United States Patent Application Publication US 2022/0090207 A1 - sequence listing, part 32

SEQ ID NO: 471201 - DNA, 234 bp, Homo sapiens
  chr3:50374684-50374918
  hyper
  myeloid_neoplasm vs. lymphoid_neoplasm,lung, multiple_myeloma,liver_bileduct,pancreas_gallbladder,ovary, head_and_neck,colorectal,breast,bladder_and_urothelial,renal, prostate,uterine,upper_gi,non_cancer
gcagtagccactgctcgtcgtgctgctccaggtcatttcgaaagaaggcgcctccgcctcgcccatagccgtacccgcccgtcccccagtcctgcgcgtccgtagccgccaaccaccgccccggtcgcgtgcgtgcgtgtacgcgtgtcagtgtgcgcgtgcgcccgggccagagccgcgccgcaaccgttaagactgaaacgtagatcgccgggatctagctcttgtctcatt

SEQ ID NO: 471202 - DNA, 34 bp, Homo sapiens; identical to SEQ ID NO: 346564
  chr3:50374946-50374980
  hyper
  myeloid_neoplasm vs. lymphoid_neoplasm,lung, multiple_myeloma,liver_bileduct,pancreas_gallbladder,ovary, head_and_neck,colorectal,breast,bladder_and_urothelial,renal, prostate,uterine,upper_gi,non_cancer

SEQ ID NO: 471203 - DNA, 38 bp, Homo sapiens; identical to SEQ ID NO: 464522
  chr3:51989952-51989990
  hyper
  myeloid_neoplasm vs. liver_bileduct,head_and_neck, uterine,breast,melanoma

SEQ ID NO: 471204 - DNA, 138 bp, Homo sapiens; identical to SEQ ID NO: 357614
  chr3:51990500-51990638
  hyper
  myeloid_neoplasm vs. liver_bileduct,head_and_neck, uterine,breast,melanoma

SEQ ID NO: 471205 - DNA, 117 bp, Homo sapiens; identical to SEQ ID NO: 370110
  chr3:52280022-52280139
  hyper
  myeloid_neoplasm vs. multiple_myeloma,lung

SEQ ID NO: 471206 - DNA, 199 bp, Homo sapiens; identical to SEQ ID NO: 331773
  chr3:53195788-53195987
  hyper
  myeloid_neoplasm vs. lymphoid_neoplasm,lung, multiple_myeloma,pancreas_gallbladder,upper_gi

SEQ ID NO: 471207 - DNA, 970 bp, Homo sapiens; identical to SEQ ID NO: 346569
  chr3:66024122-66025092
  hyper
  myeloid_neoplasm vs. ovary,upper_gi,lung, bladder_and_urothelial

SEQ ID NO: 471208 - DNA, 783 bp, Homo sapiens; identical to SEQ ID NO: 454373
  chr3:66550318-66551101
  hyper
  myeloid_neoplasm vs. upper_gi,breast,sarcoma,colorectal, prostate,cervical,pancreas_gallbladder,uterine,non_cancer, anorectal,head_and_neck,renal,lung,thyroid,ovary, bladder_and_urothelial,liver_bileduct

SEQ ID NO: 471209 - DNA, 990 bp, Homo sapiens; identical to SEQ ID NO: 454374
  chr3:66550603-66551593
  hyper
  myeloid_neoplasm vs. colorectal,upper_gi,liver_bileduct, cervical,sarcoma,breast,anorectal,prostate,uterine,non_cancer, head_and_neck,ovary,pancreas_gallbladder,renal,thyroid,lung

SEQ ID NO: 471210 - DNA, 766 bp, Homo sapiens; identical to SEQ ID NO: 454375
  chr3:66551122-66551888
  hyper
  myeloid_neoplasm vs. ovary,sarcoma,upper_gi,colorectal, cervical,anorectal,breast,head_and_neck,liver_bileduct,renal, prostate,uterine,non_cancer,lung,pancreas_gallbladder

SEQ ID NO: 471211 - DNA, 140 bp, Homo sapiens
  chr3:85010663-85010803
  hyper
  myeloid_neoplasm vs. multiple_myeloma
cgggtgtctgacacgttacttaggtttttaatccgcgctgagacaatctcacagagaccctacttcacctctcagtaacttgcatttctcagctctgctgtgtgtgtgtgtatgtgtgtgtgtgtgcgcgcgcgcgcgcc

SEQ ID NO: 471212 - DNA, 253 bp, Homo sapiens; identical to SEQ ID NO: 331842
  chr3:121741110-121741363
  hyper
  myeloid_neoplasm vs. lung,upper_gi,pancreas_gallbladder, head_and_neck,multiple_myeloma,colorectal,lymphoid_neoplasm, ovary,breast,renal,uterine,prostate,non_cancer, bladder_and_urothelial,cervical

SEQ ID NO: 471213 - DNA, 54 bp, Homo sapiens; identical to SEQ ID NO: 459688
  chr3:121902674-121902728
  hyper
  myeloid_neoplasm vs. non_cancer,multiple_myeloma

SEQ ID NO: 471214 - DNA, 57 bp, Homo sapiens; identical to SEQ ID NO: 346587
  chr3:128713000-128713057
  hyper
  myeloid_neoplasm vs. colorectal,multiple_myeloma,ovary, uterine,pancreas_gallbladder,non_cancer,lung,cervical, bladder_and_urothelial,renal,breast,prostate,anorectal,thyroid, head_and_neck

SEQ ID NO: 471215 - DNA, 2 bp, Homo sapiens
  chr3:149374946-149374948
  hyper
  myeloid_neoplasm vs. liver_bileduct,ovary, bladder_and_urothelial,thyroid
cg

SEQ ID NO: 471216 - DNA, 516 bp, Homo sapiens; identical to SEQ ID NO: 467260
  chr3:149375406-149375922
  hyper
  myeloid_neoplasm vs. liver_bileduct,ovary, bladder_and_urothelial,thyroid

SEQ ID NO: 471217 - DNA, 123 bp, Homo sapiens; identical to SEQ ID NO: 469153
  chr3:156533976-156534099
  hyper
  myeloid_neoplasm vs. non_cancer,thyroid,renal,ovary, pancreas_gallbladder

SEQ ID NO: 471218 - DNA, 142 bp, Homo sapiens; identical to SEQ ID NO: 345109
  chr3:156534539-156534681
  hyper
  myeloid_neoplasm vs. non_cancer,thyroid,renal,ovary, pancreas_gallbladder

SEQ ID NO: 471219 - DNA, 75 bp, Homo sapiens; identical to SEQ ID NO: 331946
  chr3:176915778-176915853
  hyper
  myeloid_neoplasm vs. multiple_myeloma

SEQ ID NO: 471220 - DNA, 380 bp, Homo sapiens; identical to SEQ ID NO: 454390
  chr3:187456733-187457113
  hyper
  myeloid_neoplasm vs. multiple_myeloma

SEQ ID NO: 471221 - DNA, 60 bp, Homo sapiens; identical to SEQ ID NO: 454391
  chr3:187457654-187457714
  hyper
  myeloid_neoplasm vs. multiple_myeloma

SEQ ID NO: 471222 - DNA, 509 bp, Homo sapiens; identical to SEQ ID NO: 345125
  chr3:187457654-187458163
  hyper
  myeloid_neoplasm vs. multiple_myeloma

SEQ ID NO: 471223 - DNA, 522 bp, Homo sapiens; identical to SEQ ID NO: 331987
  chr3:192635635-192636157
  hyper
  myeloid_neoplasm vs. lung

SEQ ID NO: 471224 - DNA, 147 bp, Homo sapiens; identical to SEQ ID NO: 459701
  chr3:194407289-194407436
  hyper
  myeloid_neoplasm vs. thyroid,sarcoma,non_cancer, anorectal,multiple_myeloma,uterine,prostate,cervical, bladder_and_urothelial,ovary,renal

SEQ ID NO: 471225 - DNA, 154 bp, Homo sapiens; identical to SEQ ID NO: 459702
  chr3:194407836-194407990
  hyper
  myeloid_neoplasm vs. thyroid,sarcoma,non_cancer, anorectal,multiple_myeloma,uterine,prostate,cervical, bladder_and_urothelial,ovary,renal

SEQ ID NO: 471226 - DNA, 3 bp, Homo sapiens
  chr3:194407996-194407999
  hyper
  myeloid_neoplasm vs. thyroid,sarcoma,non_cancer, anorectal,multiple_myeloma,uterine,prostate,cervical, bladder_and_urothelial,ovary,renal
cgg

SEQ ID NO: 471227 - DNA, 102 bp, Homo sapiens; identical to SEQ ID NO: 459704
  chr3:194408028-194408130
  hyper
  myeloid_neoplasm vs. thyroid,sarcoma,non_cancer, anorectal,multiple_myeloma,uterine,prostate,cervical, bladder_and_urothelial,ovary,renal

SEQ ID NO: 471228 - DNA, 154 bp, Homo sapiens; identical to SEQ ID NO: 459702
  chr3:194407836-194407990
  hyper
  myeloid_neoplasm vs. thyroid,multiple_myeloma,non_cancer, uterine,renal,anorectal,prostate

SEQ ID NO: 471229 - DNA, 3 bp, Homo sapiens
  chr3:194407996-194407999
  hyper
  myeloid_neoplasm vs. thyroid,multiple_myeloma,non_cancer, uterine,renal,anorectal,prostate
cgg

SEQ ID NO: 471230 - DNA, 102 bp, Homo sapiens; identical to SEQ ID NO: 459704
  chr3:194408028-194408130
  hyper
  myeloid_neoplasm vs. thyroid,multiple_myeloma,non_cancer, uterine,renal,anorectal,prostate

SEQ ID NO: 471231 - DNA, 821 bp, Homo sapiens; identical to SEQ ID NO: 332029
  chr4:6271360-6272181
  hyper
  myeloid_neoplasm vs. liver_bileduct,lung,upper_gi,ovary

SEQ ID NO: 471232 - DNA, 9 bp, Homo sapiens
  chr4:25656807-25656816
  hyper
  myeloid_neoplasm vs. upper_gi
gcagagcag

SEQ ID NO: 471233 - DNA, 252 bp, Homo sapiens
  chr4:25656879-25657131
  hyper
  myeloid_neoplasm vs. upper_gi
agcccccttccttttcctcagcttgacggtcccagcctttcccattgcggacctagagcccagactcccagggcagaaagcgccccacagactgataaaggtgaacaatccaggctttgtttccaagggctttatccctgactttccaactggcttttatctgtgtcttcacgtctctgacctcttgagcctcacaggagctagactagaaggttcaagttcttgaggagaaggcaggggcgggagagcccc

SEQ ID NO: 471234 - DNA, 53 bp, Homo sapiens; identical to SEQ ID NO: 357853
  chr4:25657493-25657546
  hyper
  myeloid_neoplasm vs. upper_gi

SEQ ID NO: 471235 - DNA, 305 bp, Homo sapiens; identical to SEQ ID NO: 332077
  chr4:41218387-41218692
  hyper

SEQ ID NO: 471236 - DNA, 167 bp, Homo sapiens; identical to SEQ ID NO: 370448
  chr4:56413698-56413865
  hyper
  myeloid_neoplasm vs. lung

SEQ ID NO: 471237 - DNA, 239 bp, Homo sapiens
  chr4:62068395-62068634
  hyper
  myeloid_neoplasm vs. multiple_myeloma
gacccagcctccggtcccacgtcggagctcagaagcttagggtgccaggcccccagcactataggtgggtgtgtgtgtgtctgtgcgtgtgtgtgtggtgtgtaggggtgggggcgacctcctctaccagccttacttggcggcggagtcagcgtttgagtgtgtgcgcatttttgcgccccagggacggcagagagatatttgcggggatgccggagctgatgctgctggagctgagc

SEQ ID NO: 471238 - DNA, 332 bp, Homo sapiens; identical to SEQ ID NO: 370454
  chr4:62068663-62068995
  hyper
  myeloid_neoplasm vs. multiple_myeloma

SEQ ID NO: 471239 - DNA, 320 bp, Homo sapiens; identical to SEQ ID NO: 357920
  chr4:94748540-94748860
  hyper

SEQ ID NO: 471240 - DNA, 1 bp, Homo sapiens
  chr4:100867923-100867924
  hyper
  myeloid_neoplasm vs. lymphoid_neoplasm,lung, head_and_neck,pancreas_gallbladder,upper_gi,colorectal, multiple_myeloma,prostate,liver_bileduct,renal, bladder_and_urothelial,ovary,sarcoma,melanoma,non_cancer,breast,
  CONT. FROM ABOVE: uterine,cervical,thyroid,anorectal
c

SEQ ID NO: 471241 - DNA, 258 bp, Homo sapiens; identical to SEQ ID NO: 345138
  chr4:100867945-100868203
  hyper
  myeloid_neoplasm vs. lymphoid_neoplasm,lung, head_and_neck,pancreas_gallbladder,upper_gi,colorectal, multiple_myeloma,prostate,liver_bileduct,renal, bladder_and_urothelial,ovary,sarcoma,melanoma,non_cancer,breast,
  CONT. FROM ABOVE: uterine,cervical,thyroid,anorectal

SEQ ID NO: 471242 - DNA, 702 bp, Homo sapiens
  chr4:106156138-106156840
  hyper
  myeloid_neoplasm vs. bladder_and_urothelial
cgtctggtgaagaattctgttcaggttccagcagcaatttgcaagctcctggtggcagctctgaacggtatttaaaacaaaatgaaatgaatggtgcttacttcaagcaaagctcagtgttcactaaggattccttttctgccactaccacaccaccaccaccatcacaattgcttctttctccccctcctcctcttccacaggttcctcagcttccttcagaaggaaaaagcactctgaatggtggagttttagaagaacaccaccactaccccaaccaaagtaacacaacacttttaagggaagtgaaaatagagggtaaacctgaggcaccaccttcccagagtcctaatccatctacacatgtatgcagcccttctccgatgctttctgaaaggcctcagaataattgtgtgaacaggaatgacatacagactgcagggacaatgactgttccattgtgttctgagaaaacaagaccaatgtcagaacacctcaagcataacccaccaatttttggtagcagtggagagctacaggacaactgccagcagttgatgagaaacaaagagcaagagattctgaagggtcgagacaaggagcaaacacgagatcttgtgcccccaacacagcactatctgaaaccaggatggattgaattgaaggcccctcgttttcaccaagcggaatcccatctaaaac

SEQ ID NO: 471243 - DNA, 971 bp, Homo sapiens; identical to SEQ ID NO: 357933
  chr4:106156519-106157490
  hyper
  myeloid_neoplasm vs. bladder_and_urothelial,sarcoma

SEQ ID NO: 471244 - DNA, 71 bp, Homo sapiens; identical to SEQ ID NO: 332164
  chr4:110343729-110343800
  hyper
  myeloid_neoplasm vs. lymphoid_neoplasm,colorectal,lung, pancreas_gallbladder,upper_gi,prostate,multiple_myeloma, bladder_and_urothelial,renal

SEQ ID NO: 471245 - DNA, 224 bp, Homo sapiens
  chr4:149364661-149364885
  hyper
  myeloid_neoplasm vs. ovary,colorectal,cervical,upper_gi, non_cancer,uterine,head_and_neck,lung,pancreas_gallbladder, breast,prostate,renal
cggtttccctccaaccgccccctcctcgattctcctcccgcccacccaaatgctgcagttactaagcaaaaggatggggttcctaactttgatttctaaggacttttaggcttctcatgtaaggccccgttttaggctccccgctggcccggagtcagcatcagtgacgtatacacctaaatctggtcccccggccctcggcgacccgcagcccggcggcggca

SEQ ID NO: 471246 - DNA, 439 bp, Homo sapiens
  chr4:149365430-149365869
  hyper
  myeloid_neoplasm vs. ovary,bladder_and_urothelial,breast, prostate,head_and_neck,upper_gi,colorectal,pancreas_gallbladder, lung,cervical,non_cancer,renal,multiple_myeloma,sarcoma,uterine
tctcagcttcttgcaaaatctaggttagaaccgtgcaggggcagccgccgcgatcactcgcccgccacccagcacccttgccccagggccgccagcgggcaactcgtctcctgcccgcatcccacctccgctcgccaacccgcgccctctgccctgggcgcgcaacctgccttgcccggggccgcccctgcgctctccggaccccctctcgccgctgtcagcgcaaagtgactgtcgctgcactcaccttttctaggacatggtggggaggctggggcgggggaaggggaacggctagactcccgccgccgctgctgccgccgccaccagcaagtccaatattggctgatcggcggtgaggatggagaggatgataatcccggcagtggcagtcgccctgctgacggtgggtagagcaatagtgctgttaccctacaag

SEQ ID NO: 471247 - DNA, 42 bp, Homo sapiens; identical to SEQ ID NO: 346659
  chr4:149365911-149365953
  hyper
  myeloid_neoplasm vs. ovary,bladder_and_urothelial,breast, prostate,head_and_neck,upper_gi,colorectal,pancreas_gallbladder, lung,cervical,non_cancer,renal,multiple_myeloma,sarcoma,uterine

SEQ ID NO: 471248 - DNA, 408 bp, Homo sapiens
  chr4:149365461-149365869
  hyper
  myeloid_neoplasm vs. ovary
cgtgcaggggcagccgccgcgatcactcgcccgccacccagcacccttgccccagggccgccagcgggcaactcgtctcctgcccgcatcccacctccgctcgccaacccgcgccctctgccctgggcgcgcaacctgccttgcccggggccgcccctgcgctctccggaccccctctcgccgctgtcagcgcaaagtgactgtcgctgcactcaccttttctaggacatggtggggaggctggggcgggggaaggggaacggctagactcccgccgccgctgctgccgccgccaccagcaagtccaatattggctgatcggcggtgaggatggagaggatgataatcccggcagtggcagtcgccctgctgacggtgggtagagcaatagtgctgttaccctacaag

SEQ ID NO: 471249 - DNA, 346 bp, Homo sapiens; identical to SEQ ID NO: 357982
  chr4:149365911-149366257
  hyper
  myeloid_neoplasm vs. ovary

SEQ ID NO: 471250 - DNA, 120 bp, Homo sapiens; identical to SEQ ID NO: 332230
  chr4:159093914-159094034
  hyper
  myeloid_neoplasm vs. liver_bileduct

SEQ ID NO: 471251 - DNA, 230 bp, Homo sapiens; identical to SEQ ID NO: 370612
  chr4:170679064-170679294
  hyper
  myeloid_neoplasm vs. pancreas_gallbladder

SEQ ID NO: 471252 - DNA, 220 bp, Homo sapiens
  chr4:185939454-185939674
  hyper
  myeloid_neoplasm vs. lung,upper_gi,head_and_neck
cggcggaacagcctattaaaggcttacttaattactttaatgactctggacaggctttaaaacgcactcggcgctgggacggcgggcttgctgggatttgtaaacaggcgatcatgtgagactcagcggtgggactaaaagaggcgacactgttttgtgagggtcctcgccccccggtgcccgcggccgctgcgcccctgcgctccgcgcccgcgactgc

SEQ ID NO: 471253 - DNA, 259 bp, Homo sapiens
  chr5:676510-676769
  hyper
  myeloid_neoplasm vs. cervical,prostate,lymphoid_neoplasm, renal,pancreas_gallbladder,colorectal,non_cancer,liver_bileduct
cgctggcgccgcagaggtgggccccacagccttccacacaggggcatctgacccacggcccggccccttgcaaagccaaggccgcagagggggaaggtgcaggagctctgagatgaaagaggtgatgagtttgcggcaatgtaggaatgaaatacatcggccacaggaggacgcaggtgcaaaccaccgaaataaagccattgccacacaggcggacaggacggggctcagggagaaccgctgcttttctcgggtgcga

SEQ ID NO: 471254 - DNA, 356 bp, Homo sapiens; identical to SEQ ID NO: 350028
  chr5:676926-677282
  hyper
  myeloid_neoplasm vs. cervical,prostate,lymphoid_neoplasm, renal,pancreas_gallbladder,colorectal,non_cancer,liver_bileduct

SEQ ID NO: 471255 - DNA, 463 bp, Homo sapiens
  chr5:41510373-41510836
  hyper
  myeloid_neoplasm vs. multiple_myeloma
cggcacgcgctcgcctggcctgagacccaccctggaagacgagtttccctcccgcgggcatcgtggcaagttaccacttagtggcagataaagcagggcggggcaggtggagcgggcgccgagcgcctagcccgcagcccctgcgcgcctacctggaatggctaaattggtgagggggatgctgtgcatgctctccggcagagttgccatccagtcggctaatttcagctcgtttttcccctgagacgaggccatcgtgccagtcggcgtgcagcgcgctggtcccagcactcctcgggcaggctggcaggctgctgccgctaatccaatgtttgctctagccccgctagagtttacactcctctctgcgccacacccacaggatggcgcagacacatgctaattttaataattattcaaaacaccccgtgctcccttagtgcctccgccagactccgctgga

SEQ ID NO: 471256 - DNA, 2 bp, Homo sapiens
  chr5:41510869-41510871
  hyper
  myeloid_neoplasm vs. multiple_myeloma
cc

SEQ ID NO: 471257 - DNA, 9 bp, Homo sapiens
  chr5:67584441-67584450
  hyper
  myeloid_neoplasm vs. pancreas_gallbladder,breast,thyroid, prostate,non_cancer,multiple_myeloma,sarcoma,uterine, bladder_and_urothelial,ovary,cervical
ctgcctgcc

SEQ ID NO: 471258 - DNA, 164 bp, Homo sapiens; identical to SEQ ID NO: 332389
  chr5:73843900-73844064
  hyper
  myeloid_neoplasm vs. sarcoma,anorectal, bladder_and_urothelial

SEQ ID NO: 471259 - DNA, 180 bp, Homo sapiens; identical to SEQ ID NO: 332410
  chr5:78531507-78531687
  hyper
  myeloid_neoplasm vs. multiple_myeloma,colorectal,lung, bladder_and_urothelial,head_and_neck,breast, pancreas_gallbladder

SEQ ID NO: 471260 - DNA, 768 bp, Homo sapiens
  chr5:78531956-78532724
  hyper
  myeloid_neoplasm vs. lung,multiple_myeloma,ovary, prostate
cgaatggcaacattgtggcgatgctgaggcgcagagtttaggagacgggttcatcagtcaggccggctccgggctttctgcagcagcaccaggggcgggggcggggatcttgacctgggcgagcgaccgggacgcatacagcgccggcctgaccccgcgggacccgcgcctcaccaccggagcgccgcagacgcagctccacggcctcgcgcggggggcggcgggcggccgcgaggcgctgcggcagcgcggagcttgtaaacagatccggccgcaggtgaccatgtgaactacctgctcccgggacgcttattgtccttctctcgatccgcgccacaaaggagctcggcggtcggggcgcggagggacaggcgaacgagccgggagagccggccggcgcactaagatggctgaaggcgcccggcgagggtgagcggggggcgcggcgcagccagcggggagtcctcgggcgggccgggccggcggcccttccccgcggcgagaagccggagccaccatgtcgttcgcgctggaggagacgctcgagtcggactgggtggctgtgcggccccatgtgttcgacgagcgcgagaaacacaaattcgtctttattgtggcctggaacgagattgagggcaagtttgccataacctgccacaaccggacggcccagaggcagaggagcggctcccgggagcaagcgggggcgcgagggggcgccgaggccggcggagctgcgtccgacgggagccgcgggcccggcagccc

SEQ ID NO: 471261 - DNA, 994 bp, Homo sapiens
  chr5:78532228-78533222
  hyper
  myeloid_neoplasm vs. lung,multiple_myeloma,ovary, prostate,uterine,bladder_and_urothelial,non_cancer, head_and_neck,breast,colorectal,sarcoma,cervical
cgcaggtgaccatgtgaactacctgctcccgggacgcttattgtccttctctcgatccgcgccacaaaggagctcggcggtcggggcgcggagggacaggcgaacgagccgggagagccggccggcgcactaagatggctgaaggcgcccggcgagggtgagcggggggcgcggcgcagccagcggggagtcctcgggcgggccgggccggcggcccttccccgcggcgagaagccggagccaccatgtcgttcgcgctggaggagacgctcgagtcggactgggtggctgtgcggccccatgtgttcgacgagcgcgagaaacacaaattcgtctttattgtggcctggaacgagattgagggcaagtttgccataacctgccacaaccggacggcccagaggcagaggagcggctcccgggagcaagcgggggcgcgagggggcgccgaggccggcggagctgcgtccgacgggagccgcgggcccggcagcccggcgggcaggggtcggcccgaggccactgcctctgcaactctggttaggagccccgggccccggcggagctcggcctgggcggagggcggctctcctcggagcactcgcagccttctgggggacccgcggctgcggagtcctggcagcaaaggggcggagagtcgtcttaggagcccagtgcgggccaaacccatcccgggtcagaaaacatctgaagccgacgatgcggcgggggcagccgctgcagcagcccggccggcgcccagagaggcccaggtgtcctctgtacggatagtgagcgcctctgggacggtctccgaggagatagaggtgctggaaatggtgaaggaggacgaggcacctctggcgctctcggacgcggagcagccgccgcccgccaccgagctggagtctccggccgaagagtgcagctgggccggactgttttctttccaggacctgcgcgccgtgcaccagcagctgtgctcggtgaactc

SEQ ID NO: 471262 - DNA, 768 bp, Homo sapiens
  chr5:78532726-78533494
  hyper
  myeloid_neoplasm vs. head_and_neck
cgggcaggggtcggcccgaggccactgcctctgcaactctggttaggagccccgggccccggcggagctcggcctgggcggagggcggctctcctcggagcactcgcagccttctgggggacccgcggctgcggagtcctggcagcaaaggggcggagagtcgtcttaggagcccagtgcgggccaaacccatcccgggtcagaaaacatctgaagccgacgatgcggcgggggcagccgctgcagcagcccggccggcgcccagagaggcccaggtgtcctctgtacggatagtgagcgcctctgggacggtctccgaggagatagaggtgctggaaatggtgaaggaggacgaggcacctctggcgctctcggacgcggagcagccgccgcccgccaccgagctggagtctccggccgaagagtgcagctgggccggactgttttctttccaggacctgcgcgccgtgcaccagcagctgtgctcggtgaactcgcagttggagccgtgcctgccggtgttccccgaggaaccttcgggcatgtggactgtgctgtttgggggcgcccccgagatgaccgagcaggaaatcgacactctgtgttaccagctccaggtctacctgggccacggcctggacacctgcggctggaagatcctctcccaggtgctcttcaccgagaccgatgatcccgaggagtattacgaaagcctcagcgagctgcggcagaagggctacgaagaagtgcttcagcgggccaggaagc

SEQ ID NO: 471263 - DNA, 17 bp, Homo sapiens
  chr5:112629411-112629428
  hyper
  myeloid_neoplasm vs. sarcoma,renal,multiple_myeloma
cgcttgcctcaaagact

SEQ ID NO: 471264 - DNA, 470 bp, Homo sapiens; identical to SEQ ID NO: 458145
  chr5:112629778-112630248
  hyper
  myeloid_neoplasm vs. sarcoma,renal,multiple_myeloma

SEQ ID NO: 471265 - DNA, 187 bp, Homo sapiens; identical to SEQ ID NO: 358235
  chr5:132072695-132072882
  hyper
  myeloid_neoplasm vs. lung,liver_bileduct,sarcoma

SEQ ID NO: 471266 - DNA, 218 bp, Homo sapiens; identical to SEQ ID NO: 454420
  chr5:132082800-132083018
  hyper
  myeloid_neoplasm vs. non_cancer

SEQ ID NO: 471267 - DNA, 248 bp, Homo sapiens; identical to SEQ ID NO: 358262
  chr5:139742899-139743147
  hyper
  myeloid_neoplasm vs. multiple_myeloma,lymphoid_neoplasm, pancreas_gallbladder

SEQ ID NO: 471268 - DNA, 87 bp, Homo sapiens; identical to SEQ ID NO: 332540
  chr5:148724812-148724899
  hyper
  myeloid_neoplasm vs. liver_bileduct,head_and_neck,ovary, lung,colorectal,multiple_myeloma,breast,prostate,melanoma,renal, non_cancer,lymphoid_neoplasm,upper_gi,thyroid,anorectal, bladder_and_urothelial,pancreas_gallbladder

SEQ ID NO: 471269 - DNA, 1 bp, Homo sapiens
  chr5:150536722-150536723
  hyper
  myeloid_neoplasm vs. multiple_myeloma
c

SEQ ID NO: 471270 - DNA, 317 bp, Homo sapiens
  chr5:150536746-150537063
  hyper
  myeloid_neoplasm vs. multiple_myeloma
cgcaggcagccctcccccgacaccacacacaagccattttataagcagctggagggtccaacgctcttgctctcagtcttgggcctcagccacacccttctctgcgggtcctttgactggcgtccagctgaccccaaccccggaccttcaaagtctcttgagcccccccaaattaaggccggcaggaccagcccctggctcagctccggcgcccaggaccctcaaccagaccctctgcagcaacgggactccctcccctccccctagccagggcgccctccgcccgcgcctctccgccccgaccccagatttgctcc

SEQ ID NO: 471271 - DNA, 249 bp, Homo sapiens
  chr5:176560001-176560250
  hyper
  myeloid_neoplasm vs. anorectal,cervical,thyroid, non_cancer,multiple_myeloma,bladder_and_urothelial,uterine, breast
gagctgctgcctccattttgtttcctgctcagcttggtctgtggtggtggtggtggtggtggtgtgggtttggggtgcggccgggtagggggttcgcctgcggccgcgtctgctcggggcctgaggcctcgaagaccccagcccaagcccccaggtgagccctgcggcaggaggggggttgccttggcctcgggccgaacccagcgggctgagggcaggtgcccagtggatggggagcctgggctgtaa

SEQ ID NO: 471272 - DNA, 290 bp, Homo sapiens; identical to SEQ ID NO: 345203
  chr5:176560318-176560608
  hyper
  myeloid_neoplasm vs. anorectal,cervical,thyroid, non_cancer,multiple_myeloma,bladder_and_urothelial,uterine, breast

SEQ ID NO: 471273 - DNA, 498 bp, Homo sapiens; identical to SEQ ID NO: 467538
  chr6:1313407-1313905
  hyper
  myeloid_neoplasm vs. liver_bileduct,ovary, pancreas_gallbladder,colorectal,upper_gi,non_cancer

SEQ ID NO: 471274 - DNA, 27 bp, Homo sapiens
  chr6:1314062-1314089
  hyper
  myeloid_neoplasm vs. liver_bileduct,ovary, pancreas_gallbladder,colorectal,upper_gi,non_cancer
ccctgcggctgcccgcagccctgcagg

SEQ ID NO: 471275 - DNA, 94 bp, Homo sapiens; identical to SEQ ID NO: 350278
  chr6:10420268-10420362
  hyper

SEQ ID NO: 471276 - DNA, 873 bp, Homo sapiens; identical to SEQ ID NO: 345210
  chr6:24910930-24911803
  hyper
  myeloid_neoplasm vs. lymphoid_neoplasm,renal,lung, melanoma,anorectal,head_and_neck,multiple_myeloma,thyroid, uterine,bladder_and_urothelial,prostate,breast,non_cancer, cervical,ovary,sarcoma,pancreas_gallbladder,colorectal,upper_gi,
  CONT. FROM ABOVE: liver_bileduct

SEQ ID NO: 471277 - DNA, 35 bp, Homo sapiens; identical to SEQ ID NO: 464701
  chr6:42145871-42145906
  hyper
  myeloid_neoplasm vs. thyroid,non_cancer,anorectal, multiple_myeloma

SEQ ID NO: 471278 - DNA, 45 bp, Homo sapiens; identical to SEQ ID NO: 350360
  chr6:42145975-42146020
  hyper
  myeloid_neoplasm vs. thyroid,non_cancer,anorectal, multiple_myeloma

SEQ ID NO: 471279 - DNA, 63 bp, Homo sapiens
  chr6:42928259-42928322
  hyper
  myeloid_neoplasm vs. liver_bileduct,lung,ovary, colorectal,renal,bladder_and_urothelial,breast, pancreas_gallbladder,prostate,uterine,multiple_myeloma,cervical, non_cancer,lymphoid_neoplasm,upper_gi,head_and_neck,thyroid,
  CONT. FROM ABOVE: sarcoma
cgagggtcctctcccgccgtgggattgcacagagggctgggtccgcaggctggctaaaaggac

SEQ ID NO: 471280 - DNA, 76 bp, Homo sapiens; identical to SEQ ID NO: 345235
  chr6:42928454-42928530
  hyper
  myeloid_neoplasm vs. liver_bileduct,lung,ovary, colorectal,renal,bladder_and_urothelial,breast, pancreas_gallbladder,prostate,uterine,multiple_myeloma,cervical, non_cancer,lymphoid_neoplasm,upper_gi,head_and_neck,thyroid,
  CONT. FROM ABOVE: sarcoma

SEQ ID NO: 471281 - DNA, 177 bp, Homo sapiens
  chr6:44044201-44044378
  hyper
  myeloid_neoplasm vs. multiple_myeloma,uterine,upper_gi, colorectal,non_cancer,breast,renal
cggggcctgaaggctaacttctggccttcctgcttcgggaaatcattccaataaccgggaaaaaagggggcccgaggacagagcccctgccgggccccagggggagtgtcgtcggctcctttgcgtcgccggccggcggcgtggcggggactctggccggcagcctcccgcgccgtc

SEQ ID NO: 471282 - DNA, 97 bp, Homo sapiens; identical to SEQ ID NO: 346817
  chr6:44044450-44044547
  hyper
  myeloid_neoplasm vs. multiple_myeloma,uterine,upper_gi, colorectal,non_cancer,breast,renal

SEQ ID NO: 471283 - DNA, 37 bp, Homo sapiens; identical to SEQ ID NO: 332792
  chr6:44094355-44094392
  hyper
  myeloid_neoplasm vs. upper_gi,lung,ovary, pancreas_gallbladder,colorectal,head_and_neck,renal,breast, lymphoid_neoplasm,sarcoma,liver_bileduct,melanoma,cervical

SEQ ID NO: 471284 - DNA, 39 bp, Homo sapiens
  chr6:45631098-45631137
  hyper
  myeloid_neoplasm vs. multiple_myeloma,non_cancer
cgccccgcgtctggtcgactggctccccggttgcccttc

SEQ ID NO: 471285 - DNA, 22 bp, Homo sapiens
  chr6:45631602-45631624
  hyper
  myeloid_neoplasm vs. multiple_myeloma,non_cancer
cgtttcagcgtgaaacagaccc

SEQ ID NO: 471286 - DNA, 1 bp, Homo sapiens
  chr6:108882931-108882932
  hyper
  myeloid_neoplasm vs. multiple_myeloma,lung
c

SEQ ID NO: 471287 - DNA, 72 bp, Homo sapiens; identical to SEQ ID NO: 350448
  chr6:108882975-108883047
  hyper
  myeloid_neoplasm vs. multiple_myeloma,lung

SEQ ID NO: 471288 - DNA, 69 bp, Homo sapiens; identical to SEQ ID NO: 350453
  chr6:119030678-119030747
  hyper
  myeloid_neoplasm vs. multiple_myeloma,lymphoid_neoplasm, thyroid,non_cancer,lung

SEQ ID NO: 471289 - DNA, 517 bp, Homo sapiens
  chr6:128840521-128841038
  hyper
  myeloid_neoplasm vs. liver_bileduct
cgagacgctccacttgtctccttttgggttctccggcagaaggcagacatttacagtccgcttccagccccaggccggatccggggagcgcggggccagagccccaggccggatccggggagcgcggggccagcctggcggtggttttgcccgaggagcgggctcccacgcgcgagtcaggcttcctccaccaggcgcccagacctcgatgcccatgaacgctcagagtgggtccttagaaccgcatttcaacacatcttacagggctccgccaacacacacacagaacatgctccaagcagtgcccgagcgcacagggcaagcccgggagcaacccagagctgggggaggagaaaaggggactccgggagggacggggaagtagttagacaatagtcaggggaggttattcccgggacaaaaagcacctggcaaagcgcgccgaggtcagtcccttcgaatctccacatttctgacaatggcttcccagggaatttgtttaaacacccaagtggca

SEQ ID NO: 471290 - DNA, 405 bp, Homo sapiens
  chr6:128841101-128841506
  hyper
  myeloid_neoplasm vs. liver_bileduct
tttctctcttccccactagcccggcgcaggccacgcgagacgccgaagccagcaggtccccacactctccggctagaccgtgccagcctgagccccgagcaagcttcggagaggaacaatgggtgccccgcgtcccacctggcacgaactctggggacagccctccctctaccctgtgttccccacccccggacagagagagctccccacgatccttgtccccagccctagcggggacctggctcacccctcgtgagcccaggactccaggcgttcgtcggggacgccccccggccactcacctgcggagaactggccttgggccgatcccaggagaggccaaggagagaggagcaagagcgccacaaaagcaggcagcgccgccgccgcagtcgtatccatgcc

SEQ ID NO: 471291 - DNA, 477 bp, Homo sapiens; identical to SEQ ID NO: 467592
  chr6:128841101-128841578
  hyper
  myeloid_neoplasm vs. sarcoma

SEQ ID NO: 471292 - DNA, 294 bp, Homo sapiens; identical to SEQ ID NO: 467593
  chr6:128841719-128842013
  hyper
  myeloid_neoplasm vs. sarcoma

SEQ ID NO: 471293 - DNA, 369 bp, Homo sapiens; identical to SEQ ID NO: 453400
  chr6:143247975-143248344
  hyper
  myeloid_neoplasm vs. non_cancer

SEQ ID NO: 471294 - DNA, 752 bp, Homo sapiens; identical to SEQ ID NO: 332955
  chr6:150921277-150922029
  hyper
  myeloid_neoplasm vs. lymphoid_neoplasm,upper_gi

SEQ ID NO: 471295 - DNA, 25 bp, Homo sapiens
  chr7:557636-557661
  hyper
  myeloid_neoplasm vs. ovary,lung,uterine,liver_bileduct
cgcacgcgcgcgcagacacacacac

SEQ ID NO: 471296 - DNA, 295 bp, Homo sapiens
  chr7:557697-557992
  hyper
  myeloid_neoplasm vs. ovary,lung,uterine,liver_bileduct
cgggctccggcccagccgcggccctagcgccgactaagacgcccaaatccagccggcggccgggagaagaagcctccagggaaagcgagggttaaacttccacctcgcgcagctctccgtgccctgcggagaccaccctcacctctggcctcccccactcccctccccgatttttaaggagagtcgggggtcgctggggagcctgaagcactaagttcccacgacgggggctgtggaaagtcattcatcacagcaaagctcccggggatggggatggggatggggatgggggggc

SEQ ID NO: 471297 - DNA, 238 bp, Homo sapiens; identical to SEQ ID NO: 332992
  chr7:822395-822633
  hyper
  myeloid_neoplasm vs. cervical,head_and_neck,sarcoma

SEQ ID NO: 471298 - DNA, 333 bp, Homo sapiens; identical to SEQ ID NO: 332995
  chr7:1001822-1002155
  hyper
  myeloid_neoplasm vs. head_and_neck

SEQ ID NO: 471299 - DNA, 133 bp, Homo sapiens
  chr7:4784755-4784888
  hyper
  myeloid_neoplasm vs. multiple_myeloma,sarcoma,colorectal, renal,breast,melanoma,non_cancer,head_and_neck,cervical,ovary, prostate,anorectal,thyroid,uterine
cgggaggtgggagcggggccaggccagaagagctggctgcctgcaaggctgtcccctcccagtgccgccccgcccccgcggtgcctgccttcctaatttggtgtgcattcgcctcgccagtcctcattggccg

SEQ ID NO: 471300 - DNA, 353 bp, Homo sapiens
  chr7:14028689-14029042
  hyper
  myeloid_neoplasm vs. anorectal,upper_gi
cgcaaatctcagctcagtattttatattttgagcatttagctggagatttcctcaggatctggacttctatcaacctagaggggaacaagatggcttttaggcttaaaaaaaaatcatgaatgaagctcttgaatttgcatagctaattaccctccgacagtcccattcacaaaaataaccctccctacaccgcctccttcacctggatccaaagagagccaacagagttcacaatttacatattttcggtagtagcaaaaatccgaacaagaggcgatgtatttatttacactctcgatgtttccctgcgcggtcggtgtaccccgggcagctctgattcgcaaacgtgtgc

SEQ ID NO: 471301 - DNA, 370 bp, Homo sapiens; identical to SEQ ID NO: 358751
  chr7:14029071-14029441
  hyper
  myeloid_neoplasm vs. anorectal,upper_gi

SEQ ID NO: 471302 - DNA, 2 bp, Homo sapiens
  chr7:64713004-64713006
  hyper
  myeloid_neoplasm vs. lymphoid_neoplasm,upper_gi, pancreas_gallbladder,lung,ovary,breast,uterine,renal,non_cancer, sarcoma,multiple_myeloma,prostate,colorectal,cervical
tc

SEQ ID NO: 471303 - DNA, 182 bp, Homo sapiens
  chr7:70060834-70061016
  hyper
  myeloid_neoplasm vs. colorectal,multiple_myeloma, bladder_and_urothelial,prostate,cervical,non_cancer,upper_gi, uterine,pancreas_gallbladder,head_and_neck,thyroid,anorectal, renal,breast
cggcaccgacaccgtccctttcacacggtactgagccgcgggctgcttcggggcggccctccccgccccgtgccttgccgggatggcagagcggatcagaagctgcgcgcgctctgcctgcgcgctttgcctgcgcgctttgccgccgcaacccgcgcagcagccaatccgctggtgcactg

SEQ ID NO: 471304 - DNA, 238 bp, Homo sapiens; identical to SEQ ID NO: 346911
  chr7:70061149-70061387
  hyper
  myeloid_neoplasm vs. colorectal,multiple_myeloma, bladder_and_urothelial,prostate,cervical,non_cancer,upper_gi, uterine,pancreas_gallbladder,head_and_neck,thyroid,anorectal, renal,breast

SEQ ID NO: 471305 - DNA, 244 bp, Homo sapiens; identical to SEQ ID NO: 456139
  chr7:100167136-100167380
  hyper
  myeloid_neoplasm vs. cervical,non_cancer, pancreas_gallbladder,prostate,multiple_myeloma

SEQ ID NO: 471306 - DNA, 240 bp, Homo sapiens; identical to SEQ ID NO: 456140
  chr7:100167621-100167861
  hyper
  myeloid_neoplasm vs. cervical,non_cancer, pancreas_gallbladder,prostate,multiple_myeloma

SEQ ID NO: 471307 - DNA, 240 bp, Homo sapiens; identical to SEQ ID NO: 456140
  chr7:100167621-100167861
  hyper
  myeloid_neoplasm vs. pancreas_gallbladder

SEQ ID NO: 471308 - DNA, 145 bp, Homo sapiens; identical to SEQ ID NO: 350625
  chr7:100168054-100168199
  hyper
  myeloid_neoplasm vs. pancreas_gallbladder

SEQ ID NO: 471309 - DNA, 204 bp, Homo sapiens; identical to SEQ ID NO: 467701
  chr7:123673023-123673227
  hyper
  myeloid_neoplasm vs. lung,ovary,upper_gi

SEQ ID NO: 471310 - DNA, 296 bp, Homo sapiens; identical to SEQ ID NO: 358945
  chr7:123673383-123673679
  hyper
  myeloid_neoplasm vs. lung,ovary,upper_gi

SEQ ID NO: 471311 - DNA, 35 bp, Homo sapiens; identical to SEQ ID NO: 333296
  chr7:150102887-150102922
  hyper
  myeloid_neoplasm vs. multiple_myeloma,lymphoid_neoplasm

SEQ ID NO: 471312 - DNA, 960 bp, Homo sapiens; identical to SEQ ID NO: 333303
  chr7:150784079-150785039
  hyper
  myeloid_neoplasm vs. liver_bileduct

SEQ ID NO: 471313 - DNA, 370 bp, Homo sapiens; identical to SEQ ID NO: 333305
  chr7:151038589-151038959
  hyper
  myeloid_neoplasm vs. lung,liver_bileduct,upper_gi, uterine,pancreas_gallbladder,non_cancer,prostate,head_and_neck, breast,cervical,ovary,melanoma,colorectal,lymphoid_neoplasm, thyroid,anorectal

SEQ ID NO: 471314 - DNA, 159 bp, Homo sapiens; identical to SEQ ID NO: 371772
  chr8:798791-798950
  hyper
  myeloid_neoplasm vs. upper_gi

SEQ ID NO: 471315 - DNA, 110 bp, Homo sapiens; identical to SEQ ID NO: 453442
  chr8:11561282-11561392
  hyper
  myeloid_neoplasm vs. liver_bileduct

SEQ ID NO: 471316 - DNA, 140 bp, Homo sapiens; identical to SEQ ID NO: 333372
  chr8:11726011-11726151
  hyper
  myeloid_neoplasm vs. upper_gi,colorectal, multiple_myeloma

SEQ ID NO: 471317 - DNA, 672 bp, Homo sapiens; identical to SEQ ID NO: 350720
  chr8:24771632-24772304
  hyper
  myeloid_neoplasm vs. melanoma,thyroid,colorectal

SEQ ID NO: 471318 - DNA, 311 bp, Homo sapiens; identical to SEQ ID NO: 350731
  chr8:26148757-26149068
  hyper
  myeloid_neoplasm vs. ovary,pancreas_gallbladder, bladder_and_urothelial,colorectal,upper_gi,non_cancer, lymphoid_neoplasm,prostate,uterine,multiple_myeloma,renal, breast

SEQ ID NO: 471319 - DNA, 194 bp, Homo sapiens; identical to SEQ ID NO: 350823
  chr8:119123513-119123707
  hyper
  myeloid_neoplasm vs. lung,pancreas_gallbladder, liver_bileduct,multiple_myeloma,ovary,uterine,prostate, bladder_and_urothelial,renal,head_and_neck,non_cancer, colorectal,melanoma,sarcoma,upper_gi,cervical

SEQ ID NO: 471320 - DNA, 526 bp, Homo sapiens; identical to SEQ ID NO: 333600
  chr8:145910996-145911522
  hyper
  myeloid_neoplasm vs. liver_bileduct,cervical

SEQ ID NO: 471321 - DNA, 983 bp, Homo sapiens; identical to SEQ ID NO: 467813
  chr9:14314414-14315397
  hyper
  myeloid_neoplasm vs. liver_bileduct

SEQ ID NO: 471322 - DNA, 897 bp, Homo sapiens; identical to SEQ ID NO: 467814
  chr9:14314899-14315796
  hyper
  myeloid_neoplasm vs. upper_gi,liver_bileduct,lung,ovary, sarcoma,colorectal,prostate,cervical,breast,head_and_neck

SEQ ID NO: 471323 - DNA, 219 bp, Homo sapiens
  chr9:95820744-95820963
  hyper
  myeloid_neoplasm vs. multiple_myeloma,ovary,uterine, bladder_and_urothelial,cervical,non_cancer,thyroid,prostate, breast,sarcoma,colorectal
cgcgtgcaacgccccggagtagcaacactttccgctcagccggctgccttggcccgctgggtatttggtctccccaagggcccccgcccacagcccccggccggacctcggccccagtccaacgtgtgggcgtggtctgtaagttgcatggaaccgcccctgggcgggcgtggagggcggggcctccccgcccctcacccaggcccaggcccaggcccc

SEQ ID NO: 471324 - DNA, 215 bp, Homo sapiens
  chr9:95821006-95821221
  hyper
  myeloid_neoplasm vs. multiple_myeloma,ovary,uterine, bladder_and_urothelial,cervical,non_cancer,thyroid,prostate, breast,sarcoma,colorectal
cgcctcggagcgcgcaggatgcgctgggcggccgccaccctccgtggcaaggcgaggccccgggggcgggccggggtcaccacgcctgccccagggaaccgcacaggtgagggctggggccgagtggccgcgtgcggggctctgcgcccatttcacagacgggaaagccgaggggagggggtcgcggggccgcacagccgtgggtgggggccaca

SEQ ID NO: 471325 - DNA, 429 bp, Homo sapiens; identical to SEQ ID NO: 347043
  chr9:97767434-97767863
  hyper
  myeloid_neoplasm vs. liver_bileduct,upper_gi, pancreas_gallbladder,head_and_neck,renal,bladder_and_urothelial, breast,lung,sarcoma,ovary,colorectal,cervical,uterine, non_cancer,thyroid,anorectal

SEQ ID NO: 471326 - DNA, 864 bp, Homo sapiens; identical to SEQ ID NO: 350910
  chr9:98272643-98273507
  hyper
  myeloid_neoplasm vs. ovary

SEQ ID NO: 471327 - DNA, 818 bp, Homo sapiens
  chr9:98273089-98273907
  hyper
  myeloid_neoplasm vs. ovary
cggagctccggtggccacgtgaccccgcgccaggaggcccggtgcgcgcgcgcgcccggctcccggactccccgcgcccgcgcggccggggcagagtaggtagggaggcggatgcgccgggccggctccgggcctccagcgcggtctcccgagagcccaggcgaggcgcgcgcccagccggcgcggacggacgtgccggacgcgccgtagtacattcctgaaggcggaccggcccccttacgctgcccaatgcccgcgccgcctccccgcgaccggccaatggtcgcgctcacgagtccctgcccattcagcggccccgcgctggctgcccgggcgcgctgggggctgcggcggggcgcgccggccaccggggcggtccacgcggctcccgcagggggcccgtccgccggctctccccgcccccttccttcctccccggcggtttcccctccccgcttccttccttcggcctgcgccttctccttcctccctcgccccgctccctccctcaatctcccctcccccaccagcctggccaccttccctccagcctctcctcctccccggcttcagggggaggcccttcccccgaccccctaacccgcaaaccgtatgcggtgccggggtcagggcgggatgtcccgaggaagagagggagacggggtggaggtgtttgggggcgttcgcgggatccggagggggacctgagcaccgggccagcgcggaaattcaaaactcagaccgcttaaggagcacgtgattttgtgagtgcctcagggaagggctgcggaaactcggaaagcaggcgggcagcatgc

SEQ ID NO: 471328 - DNA, 27 bp, Homo sapiens
  chr9:117880317-117880344
  hyper
  myeloid_neoplasm vs. head_and_neck,melanoma,breast, cervical,bladder_and_urothelial,sarcoma,lung,upper_gi,ovary, uterine,prostate,pancreas_gallbladder,colorectal, multiple_myeloma,anorectal,renal,non_cancer,thyroid,
  CONT. FROM ABOVE: liver_bileduct,lymphoid_neoplasm
cggcggttcccacgtgcgcgttccccc

SEQ ID NO: 471329 - DNA, 131 bp, Homo sapiens; identical to SEQ ID NO: 345327
  chr9:117880425-117880556
  hyper
  myeloid_neoplasm vs. head_and_neck,melanoma,breast, cervical,bladder_and_urothelial,sarcoma,lung,upper_gi,ovary, uterine,prostate,pancreas_gallbladder,colorectal, multiple_myeloma,anorectal,renal,non_cancer,thyroid,
  CONT. FROM ABOVE: liver_bileduct,lymphoid_neoplasm

SEQ ID NO: 471330 - DNA, 83 bp, Homo sapiens; identical to SEQ ID NO: 463093
  chr9:124990438-124990521
  hyper
  myeloid_neoplasm vs. melanoma,uterine,anorectal,breast, ovary,prostate,non_cancer,thyroid,bladder_and_urothelial,lung, multiple_myeloma,head_and_neck,renal,sarcoma,colorectal, cervical

SEQ ID NO: 471331 - DNA, 142 bp, Homo sapiens; identical to SEQ ID NO: 345329
  chr9:124991012-124991154
  hyper
  myeloid_neoplasm vs. melanoma,uterine,anorectal,breast, ovary,prostate,non_cancer,thyroid,bladder_and_urothelial,lung, multiple_myeloma,head_and_neck,renal,sarcoma,colorectal, cervical

SEQ ID NO: 471332 - DNA, 120 bp, Homo sapiens; identical to SEQ ID NO: 333794
  chr9:130661066-130661186
  hyper
  myeloid_neoplasm vs. colorectal,ovary,uterine,lung, bladder_and_urothelial,multiple_myeloma,breast, pancreas_gallbladder,sarcoma,melanoma

SEQ ID NO: 471333 - DNA, 5 bp, Homo sapiens
  chr9:131127222-131127227
  hyper
  myeloid_neoplasm vs. multiple_myeloma,ovary
cgtag

SEQ ID NO: 471334 - DNA, 138 bp, Homo sapiens; identical to SEQ ID NO: 359429
  chr9:131127341-131127479
  hyper
  myeloid_neoplasm vs. multiple_myeloma,ovary

SEQ ID NO: 471335 - DNA, 166 bp, Homo sapiens; identical to SEQ ID NO: 333802
  chr9:132176641-132176807
  hyper
  myeloid_neoplasm vs. multiple_myeloma, bladder_and_urothelial,lung,sarcoma,melanoma,colorectal, head_and_neck,pancreas_gallbladder,uterine,liver_bileduct, breast,non_cancer,prostate

SEQ ID NO: 471336 - DNA, 502 bp, Homo sapiens
  chr9:132244794-132245296
  hyper
  myeloid_neoplasm vs. lung,liver_bileduct,upper_gi
cgtgccggggcgcacggttttgctccgcgggcctctctcgctccctcgcgccggctttttccctttttctctttcctttttttctttcctggagcggagcccggcgccaggagtctggaaccagcttgacaggcttttgagttatggaggggggagggggagaggcgggcggcggggagggggaagggagggcgccgccgcggcgtgggggcggggccggctccccggtttggagactcgccccgactttggggtccgccagcggcggccgggcggagggcgggggaccgcaatcgtggggggagtcaccccgcggggcccggcgggcgaaacgggccgggcttcagagccgcagtaaatgaggcccggggcgggcgggggtggacacggcctcggggccacggcctcccccgccgagcaaggcattcctttccgctgaactgggcgcccgggcccgcgccgcgccctgcacgcctcgcgcccggcgatcgggcccagggcg

SEQ ID NO: 471337 - DNA, 424 bp, Homo sapiens
  chr9:132245345-132245769
  hyper
  myeloid_neoplasm vs. lung,liver_bileduct,upper_gi
cttcccaggagctcggctccccgggatggaagggactgatacccagttaatgggcgtggagcctgagcccctgagggtcgtcgctaacgggggtcgctcagcagggccggcctccgctgcctgcccggggtgtctaatcacctctccgatcctttgcccggatctgagcttcgtcattcacgcccctcctccctggcgactttgggcctggtgacagtcccccgaccctcgcagagccaggggcacagtaggcgccttagccactggcagaatttcaccggcgctctgcccgacgcccccagccccagggccgggcgtgggtggaagtgtctggaagggtgggttcaccagggctgggcacgtcagcggccccgtacagagaatccggtgcctggggtctctggagggggtactcagagtatcc

SEQ ID NO: 471338 - DNA, 2 bp, Homo sapiens
  chr9:132245294-132245296
  hyper
  myeloid_neoplasm vs. lung,upper_gi,liver_bileduct, uterine,multiple_myeloma
cg

SEQ ID NO: 471339 - DNA, 728 bp, Homo sapiens; identical to SEQ ID NO: 359438
  chr9:132245345-132246073
  hyper
  myeloid_neoplasm vs. lung,upper_gi,liver_bileduct, uterine,multiple_myeloma

SEQ ID NO: 471340 - DNA, 904 bp, Homo sapiens
  chr9:133710055-133710959
  hyper
  myeloid_neoplasm vs. colorectal,liver_bileduct, pancreas_gallbladder,multiple_myeloma,upper_gi,breast, head_and_neck,lung,ovary,renal,uterine,cervical,thyroid, non_cancer,prostate,anorectal,melanoma,sarcoma,
  CONT. FROM ABOVE: bladder_and_urothelial, lymphoid_neoplasm
cgtctgttcgcagcctgacctcatatcctggtctggatgtgcggcctcaccggggtgtcgtgcgcacgtgtggttgtcctgtgggtgccagctctgacttcctccccagacacccactgcctcagccttaatcacaggacgcgcgttgagtagaaatgagaccagttagtattggtaactgcagaggaatatgcattttcaccagcgttctcgggtcagagggtttgcctggcaccgcgtactgggaaactcgccaaaagcggtgcaggttggagacgccccaggccgcggtggagttgcgcgcggcttctaaagtggagtggagcaggcctgcaccctccccgccggggctgggacggcgcttccaggcggagaaagacctccgcgggccgcgcgcggccttccccctgcgaggatcgccattggcccgggttggctttggaaagcggcggtggctttgggccgggctcggcctcgggaacgccaggggcccctgggtgcggacgggcgcggccaggagggggttaaggcgcaggcggcggcggggcgggggcgggcctggcgggcgccctctccgggccctttgttaacaggcgcgtcccggccaggcggagacgcggccgcggccatgggcgggcgcgggcgcgcggggcggcggtgagggcggctggcggggccgggggcgccgggggggcgcgcgggccgagccgggcctgagccgggcccgcggaccgagctgggagaggggttccggcccccgacgtgctggcgcgggaaaatgttggagatctgcctgaagctggtgggctgcaaatccaagaaggggctgtcctcgtcctccagctgttatctggaaggtaagcccgggccgcacgggttgggctgagtagccgcgcgccctccc

SEQ ID NO: 471341 - DNA, 923 bp, Homo sapiens
  chr9:133710483-133711406
  hyper
  myeloid_neoplasm vs. upper_gi,colorectal, bladder_and_urothelial,liver_bileduct,sarcoma,head_and_neck, lung,ovary,breast,cervical,uterine,renal,pancreas_gallbladder, non_cancer,prostate,anorectal,thyroid,melanoma,multiple_myeloma,
  CONT. FROM ABOVE: lymphoid_neoplasm
cgggttggctttggaaagcggcggtggctttgggccgggctcggcctcgggaacgccaggggcccctgggtgcggacgggcgcggccaggagggggttaaggcgcaggcggcggcggggcgggggcgggcctggcgggcgccctctccgggccctttgttaacaggcgcgtcccggccaggcggagacgcggccgcggccatgggcgggcgcgggcgcgcggggcggcggtgagggcggctggcggggccgggggcgccgggggggcgcgcgggccgagccgggcctgagccgggcccgcggaccgagctgggagaggggttccggcccccgacgtgctggcgcgggaaaatgttggagatctgcctgaagctggtgggctgcaaatccaagaaggggctgtcctcgtcctccagctgttatctggaaggtaagcccgggccgcacgggttgggctgagtagccgcgcgccctcccgctgctgctgggcccttcctaggcctcgccgcccgcgcgctcccgcctgcgccctccccgggtcttgtcttttttttctttcttccctcttctcttctcttctcttcagttctcttatattctgtctctctttctttctctctgtgtctgtctcttttctcttctcttgtctctctctttttctctctctctgtctctttctctttctcgcgatggcccctaggcgccgccggcggagcgtggcccccagccccggcaccagccccggtagagccacgccggatggtgacggcggcgtccggggccccacagtgcgggctcccccgaaaaagtttgagaaagccaactcgccaggccttaacatccctgggatcccacgttgtggaatttccaccgttaattgggactgtgtgttaaaaagatcgacccgtgtttgtgaaaacatgc

SEQ ID NO: 471342 - DNA, 58 bp, Homo sapiens
  chr9:136603465-136603523
  hyper
  myeloid_neoplasm vs. multiple_myeloma
cggaactccaggcctcccccgccccccaccctcgctgccagccccatgtctccgccca

SEQ ID NO: 471343 - DNA, 29 bp, Homo sapiens
  chr9:136603632-136603661
  hyper
  myeloid_neoplasm vs. multiple_myeloma
gtgaaccccatgccccattacccgtaggc

SEQ ID NO: 471344 - DNA, 357 bp, Homo sapiens; identical to SEQ ID NO: 333839
  chr9:139401232-139401589
  hyper
  myeloid_neoplasm vs. pancreas_gallbladder,head_and_neck, cervical,uterine,ovary,renal

SEQ ID NO: 471345 - DNA, 189 bp, Homo sapiens
  chr9:140703858-140704047
  hyper
cggcggccctgcgccctcggagggaggcggggcagagctcaaatggaagcagagcctgcggggtggagaccgcacccctgcaggggtctgccttgggccccgagcctcctcagccgccgcagcaaagcggtcagtcaggcggggcttggtttatggcatctgggaagatcgctgaccattcccgagggg

SEQ ID NO: 471346 - DNA, 327 bp, Homo sapiens; identical to SEQ ID NO: 345340
  chr9:140704131-140704458
  hyper

SEQ ID NO: 471347 - DNA, 117 bp, Homo sapiens; identical to SEQ ID NO: 456206
  chrX:15755988-15756105
  hyper
  myeloid_neoplasm vs. multiple_myeloma, pancreas_gallbladder

SEQ ID NO: 471348 - DNA, 300 bp, Homo sapiens; identical to SEQ ID NO: 352654
  chrX:15756366-15756666
  hyper
  myeloid_neoplasm vs. multiple_myeloma, pancreas_gallbladder

SEQ ID NO: 471349 - DNA, 218 bp, Homo sapiens; identical to SEQ ID NO: 352699
  chrY:15863192-15863410
  hyper
  myeloid_neoplasm vs. ovary,breast,uterine,sarcoma, cervical

SEQ ID NO: 471350 - DNA, 461 bp, Homo sapiens; identical to SEQ ID NO: 345677
  chrY:15863654-15864115
  hyper
  myeloid_neoplasm vs. breast,ovary,uterine,cervical, anorectal,thyroid

SEQ ID NO: 471351 - DNA, 74 bp, Homo sapiens; identical to SEQ ID NO: 454528
  chrY:16635744-16635818
  hyper
  myeloid_neoplasm vs. breast,ovary,uterine,sarcoma, cervical,anorectal,thyroid,non_cancer

SEQ ID NO: 471352 - DNA, 624 bp, Homo sapiens; identical to SEQ ID NO: 454529
  chrY:16636060-16636684
  hyper
  myeloid_neoplasm vs. breast,ovary,uterine,sarcoma, cervical,anorectal,thyroid,non_cancer

SEQ ID NO: 471353 - DNA, 949 bp, Homo sapiens; identical to SEQ ID NO: 454530
  chrY:16636193-16637142
  hyper
  myeloid_neoplasm vs. breast,ovary,uterine,cervical, anorectal,thyroid,sarcoma

SEQ ID NO: 471354 - DNA, 205 bp, Homo sapiens; identical to SEQ ID NO: 344920
  AEKP01149809.1_1-6354:1345-1550
  hypo
  myeloid_neoplasm vs. colorectal,lymphoid_neoplasm, sarcoma,uterine,non_cancer,thyroid,anorectal,prostate

SEQ ID NO: 471355 - DNA, 523 bp, Homo sapiens; identical to SEQ ID NO: 336748
  chr1:896874-897397
  hypo
  myeloid_neoplasm vs. bladder_and_urothelial,melanoma

SEQ ID NO: 471356 - DNA, 248 bp, Homo sapiens; identical to SEQ ID NO: 336749
  chr1:897754-898002
  hypo
  myeloid_neoplasm vs. liver_bileduct

SEQ ID NO: 471357 - DNA, 21 bp, Homo sapiens
  chr1:942678-942699
  hypo
  myeloid_neoplasm vs. melanoma
cggtttatcgccaggcgcggc

SEQ ID NO: 471358 - DNA, 372 bp, Homo sapiens; identical to SEQ ID NO: 336753
  chr1:1024267-1024639
  hypo
  myeloid_neoplasm vs. ovary

SEQ ID NO: 471359 - DNA, 559 bp, Homo sapiens; identical to SEQ ID NO: 362203
  chr1:1160631-1161190
  hypo
  myeloid_neoplasm vs. liver_bileduct,ovary

SEQ ID NO: 471360 - DNA, 369 bp, Homo sapiens; identical to SEQ ID NO: 336771
  chr1:1354536-1354905
  hypo
  myeloid_neoplasm vs. ovary,sarcoma,upper_gi,lung, liver_bileduct

SEQ ID NO: 471361 - DNA, 432 bp, Homo sapiens; identical to SEQ ID NO: 470896
  chr1:1713574-1714006
  hypo
  myeloid_neoplasm vs. lymphoid_neoplasm, pancreas_gallbladder,lung,multiple_myeloma,cervical, head_and_neck,colorectal,ovary,breast,renal,upper_gi,prostate, anorectal,thyroid,non_cancer,bladder_and_urothelial,uterine,
  CONT. FROM ABOVE: liver_bileduct,sarcoma,melanoma

SEQ ID NO: 471362 - DNA, 232 bp, Homo sapiens; identical to SEQ ID NO: 344931
  chr1:1714067-1714299
  hypo
  myeloid_neoplasm vs. lymphoid_neoplasm, pancreas_gallbladder,lung,multiple_myeloma,cervical, head_and_neck,colorectal,ovary,breast,renal,upper_gi,prostate, anorectal,thyroid,non_cancer,bladder_and_urothelial,uterine,
  CONT. FROM ABOVE: liver_bileduct,sarcoma,melanoma

SEQ ID NO: 471363 - DNA, 140 bp, Homo sapiens
  chr1:1910184-1910324
  hypo
  myeloid_neoplasm vs. thyroid,prostate,breast,non_cancer
cgcgtcctgctgagctgttaggtttgtggatttgtcactgcagcgatgggatacgggtgcagtcagggaagcctcagagcaggccgggacacagcaccagcgccctgccgtgggtcccatgtggccaagcggggtgcaca

SEQ ID NO: 471364 - DNA, 49 bp, Homo sapiens
  chr1:1910367-1910416
  hypo
  myeloid_neoplasm vs. thyroid,prostate,breast,non_cancer
tgtgacgaggctgcacagaacacgtgtgtcgtgctgagctgggcgtggg

SEQ ID NO: 471365 - DNA, 10 bp, Homo sapiens
  chr1:1910445-1910455
  hypo
  myeloid_neoplasm vs. thyroid,prostate,breast,non_cancer
cacgtgtgtc

SEQ ID NO: 471366 - DNA, 72 bp, Homo sapiens; identical to SEQ ID NO: 336784
  chr1:2103120-2103192
  hypo
  myeloid_neoplasm vs. colorectal,lung

SEQ ID NO: 471367 - DNA, 8 bp, Homo sapiens
  chr1:2520950-2520958
  hypo
  myeloid_neoplasm vs. head_and_neck,renal
cggaggcg

SEQ ID NO: 471368 - DNA, 38 bp, Homo sapiens; identical to SEQ ID NO: 456246
  chr1:2520987-2521025
  hypo
  myeloid_neoplasm vs. head_and_neck,renal

SEQ ID NO: 471369 - DNA, 39 bp, Homo sapiens; identical to SEQ ID NO: 352737
  chr1:2521063-2521102
  hypo
  myeloid_neoplasm vs. head_and_neck,renal

SEQ ID NO: 471370 - DNA, 450 bp, Homo sapiens; identical to SEQ ID NO: 469936
  chr1:2850546-2850996
  hypo
  myeloid_neoplasm vs. anorectal

SEQ ID NO: 471371 - DNA, 32 bp, Homo sapiens; identical to SEQ ID NO: 352741
  chr1:2851025-2851057
  hypo
  myeloid_neoplasm vs. anorectal

SEQ ID NO: 471372 - DNA, 120 bp, Homo sapiens; identical to SEQ ID NO: 454537
  chr1:3111118-3111238
  hypo
  myeloid_neoplasm vs. renal

SEQ ID NO: 471373 - DNA, 326 bp, Homo sapiens; identical to SEQ ID NO: 347777
  chr1:3111463-3111789
  hypo
  myeloid_neoplasm vs. renal

SEQ ID NO: 471374 - DNA, 473 bp, Homo sapiens; identical to SEQ ID NO: 336832
  chr1:3195292-3195765
  hypo
  myeloid_neoplasm vs. upper_gi,head_and_neck

SEQ ID NO: 471375 - DNA, 4 bp, Homo sapiens
  chr1:3213649-3213653
  hypo
  myeloid_neoplasm vs. colorectal,sarcoma
cgcg

SEQ ID NO: 471376 - DNA, 65 bp, Homo sapiens; identical to SEQ ID NO: 375577
  chr1:3213764-3213829
  hypo
  myeloid_neoplasm vs. colorectal,sarcoma

SEQ ID NO: 471377 - DNA, 415 bp, Homo sapiens; identical to SEQ ID NO: 336853
  chr1:3552676-3553091
  hypo
  myeloid_neoplasm vs. sarcoma,melanoma,colorectal

SEQ ID NO: 471378 - DNA, 344 bp, Homo sapiens; identical to SEQ ID NO: 330664
  chr1:5772056-5772400
  hypo
  myeloid_neoplasm vs. lymphoid_neoplasm

SEQ ID NO: 471379 - DNA, 707 bp, Homo sapiens; identical to SEQ ID NO: 352763
  chr1:5918390-5919097
  hypo
  myeloid_neoplasm vs. bladder_and_urothelial,renal, lymphoid_neoplasm,breast,thyroid,anorectal,colorectal

SEQ ID NO: 471380 - DNA, 142 bp, Homo sapiens
  chr1:5950824-5950966
  hypo
  myeloid_neoplasm vs. renal,colorectal,head_and_neck
cgggatagcgcccgctccttccaagcagacagacgctggaagcgtgactcgtcccatgagggacgcagcacccactgtgcctgtccttccagagagccgctaccttcatctggacggcagcagatccgatgagcagcaggga

SEQ ID NO: 471381 - DNA, 57 bp, Homo sapiens
  chr1:6131658-6131715
  hypo
  myeloid_neoplasm vs. lymphoid_neoplasm,sarcoma,upper_gi, lung,pancreas_gallbladder,prostate,breast,uterine,colorectal
cgtgggaatcgatgtcacgacaagcaaggcgcctgctgcgtagggcacctgccgctt

SEQ ID NO: 471382 - DNA, 2 bp, Homo sapiens
  chr1:6131885-6131887
  hypo
  myeloid_neoplasm vs. lymphoid_neoplasm,sarcoma,upper_gi, lung,pancreas_gallbladder,prostate,breast,uterine,colorectal
cc

SEQ ID NO: 471383 - DNA, 127 bp, Homo sapiens; identical to SEQ ID NO: 375631
  chr1:6347184-6347311
  hypo
  myeloid_neoplasm vs. melanoma

SEQ ID NO: 471384 - DNA, 105 bp, Homo sapiens; identical to SEQ ID NO: 336891
  chr1:6738127-6738232
  hypo
  myeloid_neoplasm vs. upper_gi,liver_bileduct

SEQ ID NO: 471385 - DNA, 787 bp, Homo sapiens; identical to SEQ ID NO: 469978
  chr1:7724016-7724803
  hypo

SEQ ID NO: 471386 - DNA, 108 bp, Homo sapiens; identical to SEQ ID NO: 330679
  chr1:7843510-7843618
  hypo
  myeloid_neoplasm vs. liver_bileduct,colorectal,lung, pancreas_gallbladder,sarcoma,breast,renal,uterine,prostate, bladder_and_urothelial,non_cancer,anorectal,cervical,thyroid, ovary,upper_gi

SEQ ID NO: 471387 - DNA, 179 bp, Homo sapiens; identical to SEQ ID NO: 349165
  chr1:7844224-7844403
  hypo
  myeloid_neoplasm vs. liver_bileduct,pancreas_gallbladder, ovary,breast,lung,bladder_and_urothelial,head_and_neck,upper_gi, uterine,non_cancer,melanoma,colorectal,cervical

SEQ ID NO: 471388 - DNA, 162 bp, Homo sapiens; identical to SEQ ID NO: 362344
  chr1:11131899-11132061
  hypo
  myeloid_neoplasm vs. liver_bileduct

SEQ ID NO: 471389 - DNA, 103 bp, Homo sapiens
  chr1:11596382-11596485
  hypo
cgcccgaacgcagcgccagtggcgtacgctggaggccgtgcggcacgtgggcgtggccatcgtctccagtgccctcaccacggtcatcgccacagtgcccctc

SEQ ID NO: 471390 - DNA, 367 bp, Homo sapiens; identical to SEQ ID NO: 352796
  chr1:11596583-11596950
  hypo

SEQ ID NO: 471391 - DNA, 296 bp, Homo sapiens; identical to SEQ ID NO: 336941
  chr1:15194468-15194764
  hypo
  myeloid_neoplasm vs. head_and_neck,renal

SEQ ID NO: 471392 - DNA, 517 bp, Homo sapiens; identical to SEQ ID NO: 362371
  chr1:16464269-16464786
  hypo
  myeloid_neoplasm vs. anorectal

SEQ ID NO: 471393 - DNA, 193 bp, Homo sapiens; identical to SEQ ID NO: 336950
  chr1:17292904-17293097
  hypo
  myeloid_neoplasm vs. liver_bileduct,upper_gi

SEQ ID NO: 471394 - DNA, 44 bp, Homo sapiens; identical to SEQ ID NO: 336951
  chr1:17294741-17294785
  hypo
  myeloid_neoplasm vs. bladder_and_urothelial

SEQ ID NO: 471395 - DNA, 2 bp, Homo sapiens
  chr1:22903356-22903358
  hypo
  myeloid_neoplasm vs. colorectal
gc

SEQ ID NO: 471396 - DNA, 385 bp, Homo sapiens; identical to SEQ ID NO: 349190
  chr1:24126326-24126711
  hypo
  myeloid_neoplasm vs. multiple_myeloma,anorectal,thyroid, colorectal,cervical,breast,upper_gi,liver_bileduct,lung

SEQ ID NO: 471397 - DNA, 358 bp, Homo sapiens; identical to SEQ ID NO: 336982
  chr1:24712899-24713257
  hypo
  myeloid_neoplasm vs. liver_bileduct

SEQ ID NO: 471398 - DNA, 164 bp, Homo sapiens; identical to SEQ ID NO: 336985
  chr1:25854484-25854648
  hypo
  myeloid_neoplasm vs. melanoma,uterine,thyroid

SEQ ID NO: 471399 - DNA, 807 bp, Homo sapiens; identical to SEQ ID NO: 330733
  chr1:26662538-26663345
  hypo
  myeloid_neoplasm vs. head_and_neck,prostate,breast, non_cancer,multiple_myeloma,anorectal,ovary,uterine,lung, cervical,renal

SEQ ID NO: 471400 - DNA, 308 bp, Homo sapiens; identical to SEQ ID NO: 349195
  chr1:27332673-27332981
  hypo
  myeloid_neoplasm vs. head_and_neck,cervical

SEQ ID NO: 471401 - DNA, 698 bp, Homo sapiens; identical to SEQ ID NO: 330736
  chr1:27901989-27902687
  hypo
  myeloid_neoplasm vs. multiple_myeloma,ovary,upper_gi, colorectal,uterine

SEQ ID NO: 471402 - DNA, 103 bp, Homo sapiens; identical to SEQ ID NO: 470911
  chr1:33772741-33772844
  hypo
  myeloid_neoplasm vs. thyroid

SEQ ID NO: 471403 - DNA, 49 bp, Homo sapiens; identical to SEQ ID NO: 470912
  chr1:33772856-33772905
  hypo
  myeloid_neoplasm vs. thyroid

SEQ ID NO: 471404 - DNA, 16 bp, Homo sapiens
  chr1:33772942-33772958
  hypo
  myeloid_neoplasm vs. thyroid
gcggggcaccgctccc

SEQ ID NO: 471405 - DNA, 87 bp, Homo sapiens; identical to SEQ ID NO: 369074
  chr1:33772986-33773073
  hypo
  myeloid_neoplasm vs. thyroid

SEQ ID NO: 471406 - DNA, 25 bp, Homo sapiens
  chr1:36788081-36788106
  hypo
  myeloid_neoplasm vs. breast,cervical,lung, lymphoid_neoplasm,multiple_myeloma,head_and_neck
cggctctgcggacagctcggggccc

SEQ ID NO: 471407 - DNA, 424 bp, Homo sapiens; identical to SEQ ID NO: 470917
  chr1:38512641-38513065
  hypo
  myeloid_neoplasm vs. sarcoma,ovary,uterine,non_cancer, head_and_neck,breast

SEQ ID NO: 471408 - DNA, 482 bp, Homo sapiens; identical to SEQ ID NO: 369088
  chr1:39874756-39875238
  hypo
  myeloid_neoplasm vs. lung

SEQ ID NO: 471409 - DNA, 100 bp, Homo sapiens; identical to SEQ ID NO: 464884
  chr1:41485949-41486049
  hypo
  myeloid_neoplasm vs. cervical

SEQ ID NO: 471410 - DNA, 91 bp, Homo sapiens; identical to SEQ ID NO: 345703
  chr1:41486164-41486255
  hypo
  myeloid_neoplasm vs. cervical

SEQ ID NO: 471411 - DNA, 174 bp, Homo sapiens; identical to SEQ ID NO: 337055
  chr1:45268631-45268805
  hypo
  myeloid_neoplasm vs. melanoma

SEQ ID NO: 471412 - DNA, 153 bp, Homo sapiens; identical to SEQ ID NO: 337082
  chr1:53238160-53238313
  hypo
  myeloid_neoplasm vs. bladder_and_urothelial, pancreas_gallbladder,renal,lung

SEQ ID NO: 471413 - DNA, 207 bp, Homo sapiens; identical to SEQ ID NO: 330837
  chr1:55352463-55352670
  hypo
  myeloid_neoplasm vs. lung

SEQ ID NO: 471414 - DNA, 164 bp, Homo sapiens; identical to SEQ ID NO: 337091
  chr1:55620065-55620229
  hypo
  myeloid_neoplasm vs. liver_bileduct

SEQ ID NO: 471415 - DNA, 421 bp, Homo sapiens; identical to SEQ ID NO: 470930
  chr1:62207842-62208263
  hypo
  myeloid_neoplasm vs. liver_bileduct,head_and_neck,lung

SEQ ID NO: 471416 - DNA, 203 bp, Homo sapiens; identical to SEQ ID NO: 356781
  chr1:62208291-62208494
  hypo
  myeloid_neoplasm vs. liver_bileduct,head_and_neck,lung

SEQ ID NO: 471417 - DNA, 202 bp, Homo sapiens; identical to SEQ ID NO: 337116
  chr1:92001241-92001443
  hypo
  myeloid_neoplasm vs. pancreas_gallbladder,lung,sarcoma

SEQ ID NO: 471418 - DNA, 229 bp, Homo sapiens; identical to SEQ ID NO: 337133
  chr1:110170726-110170955
  hypo
  myeloid_neoplasm vs. head_and_neck,upper_gi

SEQ ID NO: 471419 - DNA, 365 bp, Homo sapiens; identical to SEQ ID NO: 459281
  chr1:110753530-110753895
  hypo
  myeloid_neoplasm vs. thyroid,multiple_myeloma,non_cancer

SEQ ID NO: 471420 - DNA, 47 bp, Homo sapiens; identical to SEQ ID NO: 459282
  chr1:110753957-110754004
  hypo
  myeloid_neoplasm vs. thyroid,multiple_myeloma,non_cancer

SEQ ID NO: 471421 - DNA, 16 bp, Homo sapiens
  chr1:110754101-110754117
  hypo
  myeloid_neoplasm vs. thyroid,multiple_myeloma,non_cancer
ggagccccgcagcgct

SEQ ID NO: 471422 - DNA, 243 bp, Homo sapiens; identical to SEQ ID NO: 337139
  chr1:110771992-110772235
  hypo
  myeloid_neoplasm vs. melanoma,thyroid,anorectal, non_cancer,lymphoid_neoplasm,prostate,renal,cervical, multiple_myeloma

SEQ ID NO: 471423 - DNA, 245 bp, Homo sapiens; identical to SEQ ID NO: 462256
  chr1:154474305-154474550
  hypo
  myeloid_neoplasm vs. ovary

SEQ ID NO: 471424 - DNA, 181 bp, Homo sapiens; identical to SEQ ID NO: 463144
  chr1:163392854-163393035
  hypo
  myeloid_neoplasm vs. cervical,uterine,anorectal

SEQ ID NO: 471425 - DNA, 35 bp, Homo sapiens; identical to SEQ ID NO: 362569
  chr1:163393064-163393099
  hypo
  myeloid_neoplasm vs. cervical,uterine,anorectal

SEQ ID NO: 471426 - DNA, 132 bp, Homo sapiens; identical to SEQ ID NO: 337214
  chr1:164604732-164604864
  hypo
  myeloid_neoplasm vs. sarcoma,lung,lymphoid_neoplasm, head_and_neck

SEQ ID NO: 471427 - DNA, 205 bp, Homo sapiens; identical to SEQ ID NO: 362582
  chr1:167430238-167430443
  hypo
  myeloid_neoplasm vs. ovary,uterine

SEQ ID NO: 471428 - DNA, 3 bp, Homo sapiens
  chr1:173993120-173993123
  hypo
  myeloid_neoplasm vs. melanoma,lymphoid_neoplasm
cac

SEQ ID NO: 471429 - DNA, 301 bp, Homo sapiens; identical to SEQ ID NO: 349355
  chr1:175048508-175048809
  hypo
  myeloid_neoplasm vs. melanoma

SEQ ID NO: 471430 - DNA, 388 bp, Homo sapiens; identical to SEQ ID NO: 337262
  chr1:193149436-193149824
  hypo
  myeloid_neoplasm vs. head_and_neck

SEQ ID NO: 471431 - DNA, 149 bp, Homo sapiens; identical to SEQ ID NO: 298115
  chr1:195732539-195732688
  hypo
  myeloid_neoplasm vs. lymphoid_neoplasm

SEQ ID NO: 471432 - DNA, 135 bp, Homo sapiens; identical to SEQ ID NO: 337267
  chr1:200971336-200971471
  hypo
  myeloid_neoplasm vs. pancreas_gallbladder, bladder_and_urothelial,cervical,renal,melanoma

SEQ ID NO: 471433 - DNA, 8 bp, Homo sapiens
  chr1:201797440-201797448
  hypo
  myeloid_neoplasm vs. thyroid,renal
cgtgagcc

SEQ ID NO: 471434 - DNA, 13 bp, Homo sapiens
  chr1:201797541-201797554
  hypo
  myeloid_neoplasm vs. thyroid,renal
ggccatttcccac

SEQ ID NO: 471435 - DNA, 156 bp, Homo sapiens; identical to SEQ ID NO: 337280
  chr1:204197190-204197346
  hypo
  myeloid_neoplasm vs. liver_bileduct

SEQ ID NO: 471436 - DNA, 383 bp, Homo sapiens; identical to SEQ ID NO: 337283
  chr1:204226544-204226927
  hypo
  myeloid_neoplasm vs. bladder_and_urothelial

SEQ ID NO: 471437 - DNA, 280 bp, Homo sapiens; identical to SEQ ID NO: 456307
  chr1:204530924-204531204
  hypo
  myeloid_neoplasm vs. melanoma,cervical,colorectal, lymphoid_neoplasm,anorectal,upper_gi

SEQ ID NO: 471438 - DNA, 46 bp, Homo sapiens; identical to SEQ ID NO: 352980
  chr1:228083620-228083666
  hypo
  myeloid_neoplasm vs. lymphoid_neoplasm,uterine

SEQ ID NO: 471439 - DNA, 200 bp, Homo sapiens; identical to SEQ ID NO: 463171
  chr1:228473703-228473903
  hypo
  myeloid_neoplasm vs. anorectal,renal

SEQ ID NO: 471440 - DNA, 110 bp, Homo sapiens; identical to SEQ ID NO: 352982
  chr1:228473932-228474042
  hypo
  myeloid_neoplasm vs. anorectal,renal

SEQ ID NO: 471441 - DNA, 118 bp, Homo sapiens; identical to SEQ ID NO: 331141
  chr1:228646027-228646145
  hypo
  myeloid_neoplasm vs. bladder_and_urothelial,ovary

SEQ ID NO: 471442 - DNA, 89 bp, Homo sapiens; identical to SEQ ID NO: 337374
  chr1:230821556-230821645
  hypo
  myeloid_neoplasm vs. cervical,renal,head_and_neck,breast, thyroid,liver_bileduct,anorectal,prostate,lymphoid_neoplasm

SEQ ID NO: 471443 - DNA, 282 bp, Homo sapiens; identical to SEQ ID NO: 466023
  chr1:233749801-233750083
  hypo
  myeloid_neoplasm vs. lung

SEQ ID NO: 471444 - DNA, 104 bp, Homo sapiens; identical to SEQ ID NO: 337392
  chr1:234868862-234868966
  hypo
  myeloid_neoplasm vs. colorectal,bladder_and_urothelial

SEQ ID NO: 471445 - DNA, 499 bp, Homo sapiens; identical to SEQ ID NO: 337400
  chr1:236156658-236157157
  hypo
  myeloid_neoplasm vs. sarcoma,thyroid

SEQ ID NO: 471446 - DNA, 71 bp, Homo sapiens; identical to SEQ ID NO: 337401
  chr1:236187380-236187451
  hypo
  myeloid_neoplasm vs. sarcoma,breast

SEQ ID NO: 471447 - DNA, 145 bp, Homo sapiens; identical to SEQ ID NO: 337402
  chr1:236274591-236274736
  hypo
  myeloid_neoplasm vs. anorectal

SEQ ID NO: 471448 - DNA, 307 bp, Homo sapiens; identical to SEQ ID NO: 337415
  chr1:243652455-243652762
  hypo
  myeloid_neoplasm vs. melanoma

SEQ ID NO: 471449 - DNA, 16 bp, Homo sapiens
  chr1:244200750-244200766
  hypo
  myeloid_neoplasm vs. sarcoma,melanoma
cggctggctgtggagg

SEQ ID NO: 471450 - DNA, 365 bp, Homo sapiens; identical to SEQ ID NO: 337425
  chr1:245530148-245530513
  hypo
  myeloid_neoplasm vs. pancreas_gallbladder

SEQ ID NO: 471451 - DNA, 587 bp, Homo sapiens; identical to SEQ ID NO: 362738
  chr1:245848539-245849126
  hypo
  myeloid_neoplasm vs. anorectal,ovary,thyroid, multiple_myeloma,lung

SEQ ID NO: 471452 - DNA, 202 bp, Homo sapiens; identical to SEQ ID NO: 337428
  chr1:245855725-245855927
  hypo
  myeloid_neoplasm vs. bladder_and_urothelial

SEQ ID NO: 471453 - DNA, 531 bp, Homo sapiens; identical to SEQ ID NO: 337429
  chr1:245925703-245926234
  hypo
  myeloid_neoplasm vs. renal,bladder_and_urothelial, anorectal

SEQ ID NO: 471454 - DNA, 225 bp, Homo sapiens; identical to SEQ ID NO: 337442
  chr1:247542074-247542299
  hypo
  myeloid_neoplasm vs. renal

SEQ ID NO: 471455 - DNA, 47 bp, Homo sapiens
  chr1:248328627-248328674
  hypo
  myeloid_neoplasm vs. anorectal
cggctccagtcctcagggggctccagtcctcaggagggcgctccagc

SEQ ID NO: 471456 - DNA, 190 bp, Homo sapiens; identical to SEQ ID NO: 340502
  chr10:396943-397133
  hypo
  myeloid_neoplasm vs. sarcoma

SEQ ID NO: 471457 - DNA, 47 bp, Homo sapiens; identical to SEQ ID NO: 459974
  chr10:518263-518310
  hypo
  myeloid_neoplasm vs. breast,prostate,lymphoid_neoplasm, uterine,lung,non_cancer

SEQ ID NO: 471458 - DNA, 131 bp, Homo sapiens; identical to SEQ ID NO: 354470
  chr10:518339-518470
  hypo
  myeloid_neoplasm vs. breast,prostate,lymphoid_neoplasm, uterine,lung,non_cancer

SEQ ID NO: 471459 - DNA, 270 bp, Homo sapiens; identical to SEQ ID NO: 340508
  chr10:630309-630579
  hypo
  myeloid_neoplasm vs. sarcoma

SEQ ID NO: 471460 - DNA, 142 bp, Homo sapiens; identical to SEQ ID NO: 453584
  chr10:851108-851250
  hypo
  myeloid_neoplasm vs. lymphoid_neoplasm,multiple_myeloma, liver_bileduct

SEQ ID NO: 471461 - DNA, 175 bp, Homo sapiens; identical to SEQ ID NO: 354474
  chr10:851504-851679
  hypo
  myeloid_neoplasm vs. lymphoid_neoplasm,multiple_myeloma, liver_bileduct

SEQ ID NO: 471462 - DNA, 52 bp, Homo sapiens; identical to SEQ ID NO: 464939
  chr10:1558541-1558593
  hypo
  myeloid_neoplasm vs. thyroid

SEQ ID NO: 471463 - DNA, 46 bp, Homo sapiens; identical to SEQ ID NO: 365235
  chr10:1558836-1558882
  hypo
  myeloid_neoplasm vs. thyroid

SEQ ID NO: 471464 - DNA, 445 bp, Homo sapiens; identical to SEQ ID NO: 365249
  chr10:3151595-3152040
  hypo
  myeloid_neoplasm vs. sarcoma

SEQ ID NO: 471465 - DNA, 162 bp, Homo sapiens; identical to SEQ ID NO: 459976
  chr10:3160827-3160989
  hypo
  myeloid_neoplasm vs. sarcoma

SEQ ID NO: 471466 - DNA, 125 bp, Homo sapiens; identical to SEQ ID NO: 354487
  chr10:3161171-3161296
  hypo
  myeloid_neoplasm vs. sarcoma

SEQ ID NO: 471467 - DNA, 227 bp, Homo sapiens; identical to SEQ ID NO: 340531
  chr10:3194438-3194665
  hypo
  myeloid_neoplasm vs. pancreas_gallbladder

SEQ ID NO: 471468 - DNA, 227 bp, Homo sapiens
  chr10:3330188-3330415
  hypo
  myeloid_neoplasm vs. cervical,pancreas_gallbladder, breast,uterine,ovary,prostate,head_and_neck,colorectal, non_cancer
gtatttgcacacatgtgtgttcaatctgtggatacggtacctacgtgcacttctgtacctggtttcttcctttttctacacatacattatttatctgttttttaaaattcaacttttattgctccttgtcctgccggtggccctggcaacatgccacgccggactccagcttagtttccttgttgccttgcagccaaacttacgcagtgtgcagacggagctgctca

SEQ ID NO: 471469 - DNA, 474 bp, Homo sapiens; identical to SEQ ID NO: 340538
  chr10:5529540-5530014
  hypo
  myeloid_neoplasm vs. melanoma

SEQ ID NO: 471470 - DNA, 146 bp, Homo sapiens
  chr10:6161993-6162139
  hypo
  myeloid_neoplasm vs. cervical,pancreas_gallbladder
cgcctccacctccttgcttcttactgcctcttccactcagcccacacttgcagaatgaggactgcgtcgactacaaattagacctctgcttccaccaggcctccttgatagttcagctaagagccgtgcggtgagtctcctgacgt

SEQ ID NO: 471471 - DNA, 85 bp, Homo sapiens; identical to SEQ ID NO: 365277
  chr10:7608166-7608251
  hypo
  myeloid_neoplasm vs. melanoma,non_cancer,uterine, prostate

SEQ ID NO: 471472 - DNA, 148 bp, Homo sapiens; identical to SEQ ID NO: 340567
  chr10:11204060-11204208
  hypo
  myeloid_neoplasm vs. head_and_neck

SEQ ID NO: 471473 - DNA, 441 bp, Homo sapiens; identical to SEQ ID NO: 379243
  chr10:11846800-11847241
  hypo
  myeloid_neoplasm vs. pancreas_gallbladder

SEQ ID NO: 471474 - DNA, 184 bp, Homo sapiens; identical to SEQ ID NO: 340581
  chr10:15255054-15255238
  hypo
  myeloid_neoplasm vs. ovary,anorectal,colorectal, non_cancer,cervical,prostate,uterine,bladder_and_urothelial, sarcoma,head_and_neck,renal

SEQ ID NO: 471475 - DNA, 127 bp, Homo sapiens; identical to SEQ ID NO: 340594
  chr10:21915244-21915371
  hypo
  myeloid_neoplasm vs. cervical,melanoma

SEQ ID NO: 471476 - DNA, 92 bp, Homo sapiens; identical to SEQ ID NO: 456341
  chr10:22047245-22047337
  hypo
  myeloid_neoplasm vs. anorectal

SEQ ID NO: 471477 - DNA, 83 bp, Homo sapiens
  chr10:22833864-22833947
  hypo
  myeloid_neoplasm vs. thyroid,anorectal
cgcacactcctccccagtgacacggggcctcgctgcacattcattttgttggagtatttgagcgacttctctctttcccaagc

SEQ ID NO: 471478 - DNA, 70 bp, Homo sapiens; identical to SEQ ID NO: 365315
  chr10:22834010-22834080
  hypo
  myeloid_neoplasm vs. thyroid,anorectal

SEQ ID NO: 471479 - DNA, 59 bp, Homo sapiens; identical to SEQ ID NO: 340618
  chr10:29666997-29667056
  hypo
  myeloid_neoplasm vs. liver_bileduct

SEQ ID NO: 471480 - DNA, 92 bp, Homo sapiens; identical to SEQ ID NO: 340626
  chr10:35503808-35503900
  hypo
  myeloid_neoplasm vs. anorectal

SEQ ID NO: 471481 - DNA, 12 bp, Homo sapiens
  chr10:52177724-52177736
  hypo
  myeloid_neoplasm vs. bladder_and_urothelial
cgccgtagtaga

SEQ ID NO: 471482 - DNA, 643 bp, Homo sapiens; identical to SEQ ID NO: 351052
  chr10:71892158-71892801
  hypo
  myeloid_neoplasm vs. liver_bileduct,multiple_myeloma, colorectal

SEQ ID NO: 471483 - DNA, 156 bp, Homo sapiens; identical to SEQ ID NO: 340655
  chr10:72288415-72288571
  hypo
  myeloid_neoplasm vs. anorectal

SEQ ID NO: 471484 - DNA, 402 bp, Homo sapiens; identical to SEQ ID NO: 379324
  chr10:73767536-73767938
  hypo
  myeloid_neoplasm vs. ovary

SEQ ID NO: 471485 - DNA, 253 bp, Homo sapiens; identical to SEQ ID NO: 340683
  chr10:80921761-80922014
  hypo
  myeloid_neoplasm vs. thyroid

SEQ ID NO: 471486 - DNA, 240 bp, Homo sapiens; identical to SEQ ID NO: 340687
  chr10:81032458-81032698
  hypo
  myeloid_neoplasm vs. ovary

SEQ ID NO: 471487 - DNA, 82 bp, Homo sapiens; identical to SEQ ID NO: 340690
  chr10:81060524-81060606
  hypo
  myeloid_neoplasm vs. liver_bileduct,head_and_neck, pancreas_gallbladder,lung,ovary

SEQ ID NO: 471488 - DNA, 447 bp, Homo sapiens; identical to SEQ ID NO: 340691
  chr10:81063491-81063938
  hypo
  myeloid_neoplasm vs. sarcoma,head_and_neck

SEQ ID NO: 471489 - DNA, 740 bp, Homo sapiens; identical to SEQ ID NO: 340696
  chr10:88702294-88703034
  hypo
  myeloid_neoplasm vs. liver_bileduct

SEQ ID NO: 471490 - DNA, 141 bp, Homo sapiens; identical to SEQ ID NO: 365389
  chr10:93567138-93567279
  hypo
  myeloid_neoplasm vs. sarcoma,melanoma

SEQ ID NO: 471491 - DNA, 185 bp, Homo sapiens; identical to SEQ ID NO: 340700
  chr10:93572713-93572898
  hypo
  myeloid_neoplasm vs. liver_bileduct

SEQ ID NO: 471492 - DNA, 569 bp, Homo sapiens; identical to SEQ ID NO: 334036
  chr10:102822304-102822873
  hypo
  myeloid_neoplasm vs. colorectal,multiple_myeloma

SEQ ID NO: 471493 - DNA, 737 bp, Homo sapiens; identical to SEQ ID NO: 334066
  chr10:111767130-111767867
  hypo
  myeloid_neoplasm vs. multiple_myeloma

SEQ ID NO: 471494 - DNA, 276 bp, Homo sapiens; identical to SEQ ID NO: 359707
  chr10:124134313-124134589
  hypo
  myeloid_neoplasm vs. liver_bileduct

SEQ ID NO: 471495 - DNA, 271 bp, Homo sapiens; identical to SEQ ID NO: 354600
  chr10:125617057-125617328
  hypo
  myeloid_neoplasm vs. upper_gi,renal,prostate,colorectal, lung,breast,uterine

SEQ ID NO: 471496 - DNA, 58 bp, Homo sapiens
  chr10:126198892-126198950
  hypo
  myeloid_neoplasm vs. melanoma
cgcactttggtatgcggagcccacaagctggcctggacaggcatcactgctccaggca

SEQ ID NO: 471497 - DNA, 972 bp, Homo sapiens; identical to SEQ ID NO: 470042
  chr10:126715052-126716024
  hypo
  myeloid_neoplasm vs. bladder_and_urothelial

SEQ ID NO: 471498 - DNA, 218 bp, Homo sapiens; identical to SEQ ID NO: 340785
  chr10:127817236-127817454
  hypo
  myeloid_neoplasm vs. multiple_myeloma

SEQ ID NO: 471499 - DNA, 105 bp, Homo sapiens; identical to SEQ ID NO: 365461
  chr10:129228001-129228106
  hypo
  myeloid_neoplasm vs. head_and_neck,prostate,uterine

SEQ ID NO: 471500 - DNA, 176 bp, Homo sapiens; identical to SEQ ID NO: 340790
  chr10:129241072-129241248
  hypo
  myeloid_neoplasm vs. upper_gi,prostate,renal,lung, head_and_neck,breast,uterine

SEQ ID NO: 471501 - DNA, 166 bp, Homo sapiens; identical to SEQ ID NO: 340791
  chr10:129242401-129242567
  hypo
  myeloid_neoplasm vs. cervical,anorectal,breast,lung, head_and_neck,upper_gi

SEQ ID NO: 471502 - DNA, 175 bp, Homo sapiens; identical to SEQ ID NO: 340794
  chr10:130300191-130300366
  hypo
  myeloid_neoplasm vs. colorectal

SEQ ID NO: 471503 - DNA, 161 bp, Homo sapiens; identical to SEQ ID NO: 340796
  chr10:131566947-131567108
  hypo
  myeloid_neoplasm vs. bladder_and_urothelial,melanoma, breast,ovary

SEQ ID NO: 471504 - DNA, 351 bp, Homo sapiens; identical to SEQ ID NO: 340797
  chr10:131638488-131638839
  hypo
  myeloid_neoplasm vs. anorectal,sarcoma

SEQ ID NO: 471505 - DNA, 136 bp, Homo sapiens
  chr10:131987142-131987278
  hypo
  myeloid_neoplasm vs. thyroid
cgagtggctcagccagggttcattaccaggctccggatcctgcttctcccggatcacagcaagcgctgtgcttaggcctggggtgggggacggattctccctgaaggcaggtctgacgcgggcgggagcacccacc

SEQ ID NO: 471506 - DNA, 17 bp, Homo sapiens
  chr10:131987316-131987333
  hypo
  myeloid_neoplasm vs. thyroid
cagagggtgaggtcgcc

SEQ ID NO: 471507 - DNA, 238 bp, Homo sapiens; identical to SEQ ID NO: 340810
  chr10:133834585-133834823
  hypo
  myeloid_neoplasm vs. sarcoma,prostate

SEQ ID NO: 471508 - DNA, 429 bp, Homo sapiens; identical to SEQ ID NO: 340815
  chr10:134049521-134049950
  hypo
  myeloid_neoplasm vs. renal,anorectal,melanoma

SEQ ID NO: 471509 - DNA, 167 bp, Homo sapiens; identical to SEQ ID NO: 340821
  chr10:134298551-134298718
  hypo
  myeloid_neoplasm vs. anorectal,cervical,prostate,breast, non_cancer

SEQ ID NO: 471510 - DNA, 253 bp, Homo sapiens
  chr10:134562467-134562720
  hypo
  myeloid_neoplasm vs. melanoma,cervical,renal
cgccccagggactggtttgagcctgttaacaccacaaagcaggcgtgtgacctcagccatccctcccacgtcagcttcacccagatgagcctgttgagacggttcccggtcaagccgcctgcagcccttgcccgttgtcacagtcgaacagctctcgagggagttcagggacgggagagagcgagcgggaggaggccggccatgtgcccccgcaggcaccctctttgctgttctcagtgctgctgtgccttcc

SEQ ID NO: 471511 - DNA, 324 bp, Homo sapiens; identical to SEQ ID NO: 313431
  chr10:134562783-134563107
  hypo
  myeloid_neoplasm vs. melanoma,cervical,renal

SEQ ID NO: 471512 - DNA, 195 bp, Homo sapiens; identical to SEQ ID NO: 365493
  chr10:134639765-134639960
  hypo

SEQ ID NO: 471513 - DNA, 387 bp, Homo sapiens; identical to SEQ ID NO: 463237
  chr10:134830248-134830635
  hypo
  myeloid_neoplasm vs. melanoma,bladder_and_urothelial, head_and_neck,colorectal,uterine,anorectal,thyroid

SEQ ID NO: 471514 - DNA, 79 bp, Homo sapiens; identical to SEQ ID NO: 354635
  chr10:134830671-134830750
  hypo
  myeloid_neoplasm vs. melanoma,bladder_and_urothelial, head_and_neck,colorectal,uterine,anorectal,thyroid

SEQ ID NO: 471515 - DNA, 70 bp, Homo sapiens; identical to SEQ ID NO: 340872
  chr10:135125649-135125719
  hypo
  myeloid_neoplasm vs. head_and_neck,liver_bileduct,breast, lymphoid_neoplasm,uterine,bladder_and_urothelial, pancreas_gallbladder,renal,thyroid,upper_gi,prostate,non_cancer, lung,ovary

SEQ ID NO: 471516 - DNA, 808 bp, Homo sapiens; identical to SEQ ID NO: 340878
  chr11:376596-377404
  hypo
  myeloid_neoplasm vs. sarcoma

SEQ ID NO: 471517 - DNA, 175 bp, Homo sapiens; identical to SEQ ID NO: 340879
  chr11:380592-380767
  hypo
  myeloid_neoplasm vs. anorectal,breast, bladder_and_urothelial,ovary,cervical,renal,lung,prostate

SEQ ID NO: 471518 - DNA, 364 bp, Homo sapiens; identical to SEQ ID NO: 340894
  chr11:799220-799584
  hypo
  myeloid_neoplasm vs. upper_gi

SEQ ID NO: 471519 - DNA, 39 bp, Homo sapiens
  chr11:823426-823465
  hypo
  myeloid_neoplasm vs. sarcoma,melanoma,uterine,anorectal
cgggtagtgaagggaggtggctgttgggggtgccaggga

SEQ ID NO: 471520 - DNA, 410 bp, Homo sapiens
  chr11:823494-823904
  hypo
  myeloid_neoplasm vs. sarcoma,melanoma,uterine,anorectal
ccctccgctccatttaaccctcctcactgcaggtgctgcgagagatgtgcaagcagggataccgggatggcctgcgctttctgcagcggaacggtgcgcggacccgggcgggagagggcggggtgggctcggctctgctaccccctgcgggccgcggccgcgctgatgaactgagaatcccttctctccccaaccccaggcctcctgaaccggcccaaccccttgctggcgttgccccccgcccgcccccacggcccagaggacaaggaccaggcagtggagagcgcccaagcggaggattactcgcagctgcccggagaagatcacatcctggagcacctgcccgcccggctcaatgagggtgcgcacctgggggacgggaggggaggaggggaggcaggagggaaaga

SEQ ID NO: 471521 - DNA, 186 bp, Homo sapiens; identical to SEQ ID NO: 365553
  chr11:1015850-1016036
  hypo
  myeloid_neoplasm vs. cervical,breast, pancreas_gallbladder,colorectal,non_cancer

SEQ ID NO: 471522 - DNA, 40 bp, Homo sapiens
  chr11:1228791-1228831
  hypo
cgcagctcaggaagccaccggtagctccactgagaccagc

SEQ ID NO: 471523 - DNA, 140 bp, Homo sapiens; identical to SEQ ID NO: 379568
  chr11:1228883-1229023
  hypo

SEQ ID NO: 471524 - DNA, 90 bp, Homo sapiens; identical to SEQ ID NO: 365565
  chr11:1301047-1301137
  hypo
  myeloid_neoplasm vs. ovary

SEQ ID NO: 471525 - DNA, 102 bp, Homo sapiens
  chr11:1477651-1477753
  hypo
  myeloid_neoplasm vs. lymphoid_neoplasm
cgtgttccagaagccggtcaagttccaggttgatatcacctacacggagggtggggaggcgcagaaggagaacggcatctactccgtcaccttcaccctgct

SEQ ID NO: 471526 - DNA, 66 bp, Homo sapiens; identical to SEQ ID NO: 365573
  chr11:1478347-1478413
  hypo
  myeloid_neoplasm vs. lymphoid_neoplasm

SEQ ID NO: 471527 - DNA, 35 bp, Homo sapiens; identical to SEQ ID NO: 469572
  chr11:1975930-1975965
  hypo
  myeloid_neoplasm vs. sarcoma

SEQ ID NO: 471528 - DNA, 408 bp, Homo sapiens; identical to SEQ ID NO: 470092
  chr11:2436014-2436422
  hypo
  myeloid_neoplasm vs. thyroid

SEQ ID NO: 471529 - DNA, 136 bp, Homo sapiens; identical to SEQ ID NO: 365595
  chr11:2436611-2436747
  hypo
  myeloid_neoplasm vs. thyroid

SEQ ID NO: 471530 - DNA, 2 bp, Homo sapiens
  chr11:3110962-3110964
  hypo
  myeloid_neoplasm vs. cervical,uterine
cg

SEQ ID NO: 471531 - DNA, 285 bp, Homo sapiens; identical to SEQ ID NO: 365597
  chr11:3110995-3111280
  hypo
  myeloid_neoplasm vs. cervical,uterine

SEQ ID NO: 471532 - DNA, 139 bp, Homo sapiens; identical to SEQ ID NO: 340986
  chr11:12073866-12074005
  hypo
  myeloid_neoplasm vs. thyroid,anorectal

SEQ ID NO: 471533 - DNA, 288 bp, Homo sapiens; identical to SEQ ID NO: 466178
  chr11:12132212-12132500
  hypo
  myeloid_neoplasm vs. ovary

SEQ ID NO: 471534 - DNA, 171 bp, Homo sapiens; identical to SEQ ID NO: 341017
  chr11:31808842-31809013
  hypo
  myeloid_neoplasm vs. uterine,upper_gi,sarcoma, head_and_neck,prostate,non_cancer

SEQ ID NO: 471535 - DNA, 211 bp, Homo sapiens
  chr11:43543814-43544025
  hypo
  myeloid_neoplasm vs. sarcoma
cgtgtggatagacagtggcaacgacaacgtggacatcaaggctgccgcgagctcggaattgttgtgtgcaacatcccgtccggagccctggaagagacagccgactccaccgtctgcgacatcctcaatctgtaccggaggaacacgtgggtgtgccaggcactgcgggaagggacgtgggttcagagcatggagcaaatcctcgaggtgg

SEQ ID NO: 471536 - DNA, 98 bp, Homo sapiens; identical to SEQ ID NO: 354713
  chr11:43544070-43544168
  hypo
  myeloid_neoplasm vs. sarcoma

SEQ ID NO: 471537 - DNA, 2 bp, Homo sapiens
  chr11:46920025-46920027
  hypo
  myeloid_neoplasm vs. colorectal,head_and_neck,cervical, sarcoma,renal,anorectal,lymphoid_neoplasm,non_cancer,uterine, thyroid,melanoma,prostate,pancreas_gallbladder
cg

SEQ ID NO: 471538 - DNA, 117 bp, Homo sapiens; identical to SEQ ID NO: 348489
  chr11:46920042-46920159
  hypo
  myeloid_neoplasm vs. colorectal,head_and_neck,cervical, sarcoma,renal,anorectal,lymphoid_neoplasm,non_cancer,uterine, thyroid,melanoma,prostate,pancreas_gallbladder

SEQ ID NO: 471539 - DNA, 173 bp, Homo sapiens; identical to SEQ ID NO: 365677
  chr11:61490870-61491043
  hypo
  myeloid_neoplasm vs. sarcoma

SEQ ID NO: 471540 - DNA, 213 bp, Homo sapiens; identical to SEQ ID NO: 351207
  chr11:62369471-62369684
  hypo
  myeloid_neoplasm vs. lymphoid_neoplasm,upper_gi, pancreas_gallbladder,uterine,multiple_myeloma,breast,ovary,lung, sarcoma,colorectal,renal,cervical,head_and_neck,non_cancer, melanoma,prostate,thyroid

SEQ ID NO: 471541 - DNA, 8 bp, Homo sapiens
  chr11:63779104-63779112
  hypo
  myeloid_neoplasm vs. melanoma
cgcaagca

SEQ ID NO: 471542 - DNA, 88 bp, Homo sapiens; identical to SEQ ID NO: 365693
  chr11:63779256-63779344
  hypo
  myeloid_neoplasm vs. melanoma

SEQ ID NO: 471543 - DNA, 80 bp, Homo sapiens; identical to SEQ ID NO: 341093
  chr11:63864329-63864409
  hypo
  myeloid_neoplasm vs. upper_gi,pancreas_gallbladder,ovary, melanoma,renal,breast

SEQ ID NO: 471544 - DNA, 305 bp, Homo sapiens; identical to SEQ ID NO: 341094
  chr11:63885581-63885886
  hypo
  myeloid_neoplasm vs. melanoma,head_and_neck, bladder_and_urothelial,renal,anorectal,sarcoma,lung,upper_gi, liver_bileduct,prostate

SEQ ID NO: 471545 - DNA, 306 bp, Homo sapiens; identical to SEQ ID NO: 461452
  chr11:64129097-64129403
  hypo
  myeloid_neoplasm vs. bladder_and_urothelial,colorectal, ovary

SEQ ID NO: 471546 - DNA, 634 bp, Homo sapiens; identical to SEQ ID NO: 354746
  chr11:64135647-64136281
  hypo
  myeloid_neoplasm vs. melanoma,liver_bileduct

SEQ ID NO: 471547 - DNA, 33 bp, Homo sapiens; identical to SEQ ID NO: 359870
  chr11:65307510-65307543
  hypo
  myeloid_neoplasm vs. uterine,multiple_myeloma,cervical, ovary,head_and_neck

SEQ ID NO: 471548 - DNA, 61 bp, Homo sapiens; identical to SEQ ID NO: 341127
  chr11:66475619-66475680
  hypo
  myeloid_neoplasm vs. lung

SEQ ID NO: 471549 - DNA, 250 bp, Homo sapiens; identical to SEQ ID NO: 341139
  chr11:67432668-67432918
  hypo
  myeloid_neoplasm vs. head_and_neck, bladder_and_urothelial

SEQ ID NO: 471550 - DNA, 74 bp, Homo sapiens; identical to SEQ ID NO: 341140
  chr11:67450470-67450544
  hypo
  myeloid_neoplasm vs. head_and_neck,lung,liver_bileduct, lymphoid_neoplasm,breast

SEQ ID NO: 471551 - DNA, 72 bp, Homo sapiens; identical to SEQ ID NO: 456400
  chr11:68564274-68564346
  hypo
  myeloid_neoplasm vs. liver_bileduct,melanoma,colorectal, pancreas_gallbladder,uterine

SEQ ID NO: 471552 - DNA, 167 bp, Homo sapiens; identical to SEQ ID NO: 354776
  chr11:68564381-68564548
  hypo
  myeloid_neoplasm vs. liver_bileduct,melanoma,colorectal, pancreas_gallbladder,uterine

SEQ ID NO: 471553 - DNA, 8 bp, Homo sapiens
  chr11:69466042-69466050
  hypo
  myeloid_neoplasm vs. anorectal,uterine,breast,renal
acatctga

SEQ ID NO: 471554 - DNA, 267 bp, Homo sapiens; identical to SEQ ID NO: 341156
  chr11:69931095-69931362
  hypo

SEQ ID NO: 471555 - DNA, 109 bp, Homo sapiens; identical to SEQ ID NO: 341160
  chr11:69972743-69972852
  hypo
  myeloid_neoplasm vs. melanoma

SEQ ID NO: 471556 - DNA, 189 bp, Homo sapiens; identical to SEQ ID NO: 341170
  chr11:71185648-71185837
  hypo
  myeloid_neoplasm vs. liver_bileduct,anorectal, bladder_and_urothelial,colorectal,uterine

SEQ ID NO: 471557 - DNA, 197 bp, Homo sapiens; identical to SEQ ID NO: 365762
  chr11:71188519-71188716
  hypo
  myeloid_neoplasm vs. liver_bileduct,renal

SEQ ID NO: 471558 - DNA, 835 bp, Homo sapiens; identical to SEQ ID NO: 341173
  chr11:71229615-71230450
  hypo
  myeloid_neoplasm vs. ovary

SEQ ID NO: 471559 - DNA, 120 bp, Homo sapiens; identical to SEQ ID NO: 365769
  chr11:72466088-72466208
  hypo
  myeloid_neoplasm vs. sarcoma

SEQ ID NO: 471560 - DNA, 139 bp, Homo sapiens; identical to SEQ ID NO: 464998
  chr11:72475539-72475678
  hypo
  myeloid_neoplasm vs. renal,anorectal

SEQ ID NO: 471561 - DNA, 317 bp, Homo sapiens; identical to SEQ ID NO: 365771
  chr11:72475723-72476040
  hypo
  myeloid_neoplasm vs. renal,anorectal

SEQ ID NO: 471562 - DNA, 236 bp, Homo sapiens
  chr11:72532378-72532614
  hypo
  myeloid_neoplasm vs. renal,lymphoid_neoplasm, bladder_and_urothelial
tggtgctgggagcggagcgctggcttcccactcttcaggcgaggcagtggagcgggttgctcttgccagagaggttcctagtagggtcgcagagaaacgaagcggcacggcgaggattgggacccagggctgactccagagcccgagggccttccactgctccacaaacagcagcgcgtccctgtgcaaggtcccaaacctgtgtggggctcagcttgcttttcaggaagggggcg

SEQ ID NO: 471563 - DNA, 127 bp, Homo sapiens; identical to SEQ ID NO: 341211
  chr11:93212118-93212245
  hypo
  myeloid_neoplasm vs. head_and_neck

SEQ ID NO: 471564 - DNA, 238 bp, Homo sapiens; identical to SEQ ID NO: 365804
  chr11:112370546-112370784
  hypo
  myeloid_neoplasm vs. cervical

SEQ ID NO: 471565 - DNA, 317 bp, Homo sapiens; identical to SEQ ID NO: 341235
  chr11:116691767-116692084
  hypo
  myeloid_neoplasm vs. thyroid,breast,cervical

SEQ ID NO: 471566 - DNA, 130 bp, Homo sapiens
  chr11:130079199-130079329
  hypo
  myeloid_neoplasm vs. uterine,pancreas_gallbladder, upper_gi,colorectal,cervical,lung,non_cancer
cgcggattacccgtttgtcagccccgggcatctgggctgttccagagttttctagtccaatgacccgtggggagcgtctcgaatgacgctgccctcgaagcagcccggctctcagccccgtcctgccctc

SEQ ID NO: 471567 - DNA, 430 bp, Homo sapiens; identical to SEQ ID NO: 354835
  chr11:130079388-130079818
  hypo
  myeloid_neoplasm vs. uterine,pancreas_gallbladder, upper_gi,colorectal,cervical,lung,non_cancer

SEQ ID NO: 471568 - DNA, 67 bp, Homo sapiens; identical to SEQ ID NO: 456411
  chr11:130785392-130785459
  hypo

SEQ ID NO: 471569 - DNA, 149 bp, Homo sapiens; identical to SEQ ID NO: 341298
  chr11:134088886-134089035
  hypo
  myeloid_neoplasm vs. breast,cervical

SEQ ID NO: 471570 - DNA, 175 bp, Homo sapiens; identical to SEQ ID NO: 341301
  chr11:134317588-134317763
  hypo
  myeloid_neoplasm vs. thyroid,anorectal,lymphoid_neoplasm, prostate

SEQ ID NO: 471571 - DNA, 157 bp, Homo sapiens; identical to SEQ ID NO: 341304
  chr11:134852683-134852840
  hypo
  myeloid_neoplasm vs. lymphoid_neoplasm,uterine, bladder_and_urothelial

SEQ ID NO: 471572 - DNA, 263 bp, Homo sapiens; identical to SEQ ID NO: 341382
  chr12:31255691-31255954
  hypo
  myeloid_neoplasm vs. melanoma,anorectal,liver_bileduct, bladder_and_urothelial,breast,ovary,cervical

SEQ ID NO: 471573 - DNA, 186 bp, Homo sapiens
  chr12:34358307-34358493
  hypo
cgtcggaggaaagggggcctcccggaaagctcaaagtctgagcaggggatggaaaactctggcgtccccactcaacagcagggcggtgctgcggcgatccagtgcacgcccttgccgccggcgatggcgggaggctcttggaggccggaaagcgcagcgcagcggcccacagtgctccggcgtgga

SEQ ID NO: 471574 - DNA, 137 bp, Homo sapiens; identical to SEQ ID NO: 380035
  chr12:34358522-34358659
  hypo

SEQ ID NO: 471575 - DNA, 95 bp, Homo sapiens; identical to SEQ ID NO: 463292
  chr12:38595387-38595482
  hypo
  myeloid_neoplasm vs. anorectal

SEQ ID NO: 471576 - DNA, 37 bp, Homo sapiens; identical to SEQ ID NO: 365943
  chr12:38595561-38595598
  hypo
  myeloid_neoplasm vs. anorectal

SEQ ID NO: 471577 - DNA, 34 bp, Homo sapiens; identical to SEQ ID NO: 456431
  chr12:47629013-47629047
  hypo
  myeloid_neoplasm vs. anorectal,colorectal, pancreas_gallbladder,prostate,ovary,uterine,non_cancer, bladder_and_urothelial,head_and_neck

SEQ ID NO: 471578 - DNA, 142 bp, Homo sapiens; identical to SEQ ID NO: 456429
  chr12:47629208-47629350
  hypo
  myeloid_neoplasm vs. anorectal,colorectal, pancreas_gallbladder,prostate,ovary,uterine,non_cancer, bladder_and_urothelial,head_and_neck

SEQ ID NO: 471579 - DNA, 112 bp, Homo sapiens; identical to SEQ ID NO: 456430
  chr12:47629379-47629491
  hypo
  myeloid_neoplasm vs. anorectal,colorectal, pancreas_gallbladder,prostate,ovary,uterine,non_cancer, bladder_and_urothelial,head_and_neck

SEQ ID NO: 471580 - DNA, 243 bp, Homo sapiens; identical to SEQ ID NO: 348555
  chr12:47629544-47629787
  hypo
  myeloid_neoplasm vs. anorectal,colorectal, pancreas_gallbladder,prostate,ovary,uterine,non_cancer, bladder_and_urothelial,head_and_neck

SEQ ID NO: 471581 - DNA, 213 bp, Homo sapiens; identical to SEQ ID NO: 334523
  chr12:52294173-52294386
  hypo
  myeloid_neoplasm vs. cervical

SEQ ID NO: 471582 - DNA, 40 bp, Homo sapiens; identical to SEQ ID NO: 461473
  chr12:52387815-52387855
  hypo
  myeloid_neoplasm vs. sarcoma,melanoma,upper_gi

SEQ ID NO: 471583 - DNA, 196 bp, Homo sapiens
  chr12:52467443-52467639
  hypo
  myeloid_neoplasm vs. bladder_and_urothelial, pancreas_gallbladder,melanoma
cgctcggaggtgctggaggtgtcggtggaggggcggcaggtggaggaggccatgctggctgtgctgcacacggtgcttctgcaccgcagcacaggcaagttccactacaagaaggagggcacctactccattggcaccgtgggcacccaggatgttgactgtgacttcatcgacttcacttatgtgcgtgtctctt

SEQ ID NO: 471584 - DNA, 228 bp, Homo sapiens
  chr12:52913581-52913809
  hypo
  myeloid_neoplasm vs. cervical
cggtcctcaccctctggatgctggggtcgatttgcaggttgaggggagtcaggagactctggttgacagtgacctcttggatacctccaggagggcagacaggaaagccagggccaccgaagccacctccaaagccagctccgccaccgagcccaaagccaccaccagctccaccgccgaaaccaaatccactaccggcaccacctccaaagccatagccgcctccag

SEQ ID NO: 471585 - DNA, 220 bp, Homo sapiens
  chr12:52913838-52914058
  hypo
  myeloid_neoplasm vs. cervical
ccaccactagtgctgatggatatcctcttggagccccccaggttgtagaggctccggctgccatagccacccactccacaagcacccgcaaggctgaccctgccgaagccaccaccaccgccacccccggaccgggacacggaggtgaagctggtgcgggagacagacggggtgatggcagaggcggtgctgaagctacgactgcccccgctccggaagg

SEQ ID NO: 471586 - DNA, 101 bp, Homo sapiens; identical to SEQ ID NO: 365969
  chr12:52914087-52914188
  hypo
  myeloid_neoplasm vs. cervical

SEQ ID NO: 471587 - DNA, 277 bp, Homo sapiens; identical to SEQ ID NO: 334568
  chr12:56472747-56473024
  hypo
  myeloid_neoplasm vs. lung

SEQ ID NO: 471588 - DNA, 117 bp, Homo sapiens
  chr12:63195619-63195736
  hypo
  myeloid_neoplasm vs. thyroid
cgctccgatgaccaggcactcatggggaatcttcttctcggtaaagaagcgtgtggggggcgtgctgggggagcccggggcccccacccctccgcgcagggaggctgcccgggtcag

SEQ ID NO: 471589 - DNA, 160 bp, Homo sapiens; identical to SEQ ID NO: 365992
  chr12:63195813-63195973
  hypo
  myeloid_neoplasm vs. thyroid

SEQ ID NO: 471590 - DNA, 437 bp, Homo sapiens; identical to SEQ ID NO: 360169
  chr12:89747140-89747577
  hypo
  myeloid_neoplasm vs. multiple_myeloma, pancreas_gallbladder,lung

SEQ ID NO: 471591 - DNA, 226 bp, Homo sapiens; identical to SEQ ID NO: 341484
  chr12:109507780-109508006
  hypo
  myeloid_neoplasm vs. bladder_and_urothelial

SEQ ID NO: 471592 - DNA, 143 bp, Homo sapiens; identical to SEQ ID NO: 341486
  chr12:109898449-109898592
  hypo
  myeloid_neoplasm vs. melanoma

SEQ ID NO: 471593 - DNA, 159 bp, Homo sapiens; identical to SEQ ID NO: 354925
  chr12:109970799-109970958
  hypo
  myeloid_neoplasm vs. sarcoma,bladder_and_urothelial, renal

SEQ ID NO: 471594 - DNA, 390 bp, Homo sapiens; identical to SEQ ID NO: 354936
  chr12:111800610-111801000
  hypo
  myeloid_neoplasm vs. lung,sarcoma,liver_bileduct,ovary, upper_gi,breast,colorectal,anorectal,lymphoid_neoplasm

SEQ ID NO: 471595 - DNA, 58 bp, Homo sapiens; identical to SEQ ID NO: 341514
  chr12:113704033-113704091
  hypo
  myeloid_neoplasm vs. anorectal,head_and_neck

SEQ ID NO: 471596 - DNA, 615 bp, Homo sapiens; identical to SEQ ID NO: 334652
  chr12:113796265-113796880
  hypo
  myeloid_neoplasm vs. lung,multiple_myeloma, liver_bileduct,pancreas_gallbladder,upper_gi, bladder_and_urothelial,renal,breast,non_cancer

SEQ ID NO: 471597 - DNA, 582 bp, Homo sapiens; identical to SEQ ID NO: 334683
  chr12:122460955-122461537
  hypo
  myeloid_neoplasm vs. upper_gi

SEQ ID NO: 471598 - DNA, 63 bp, Homo sapiens
  chr12:122463078-122463141
  hypo
  myeloid_neoplasm vs. pancreas_gallbladder,ovary
cgatggtaggagacgaaagcttgggctgcagcgtaagcttggaggcccgctgcggtggctcac

SEQ ID NO: 471599 - DNA, 192 bp, Homo sapiens; identical to SEQ ID NO: 341594
  chr12:124335343-124335535
  hypo
  myeloid_neoplasm vs. head_and_neck

SEQ ID NO: 471600 - DNA, 251 bp, Homo sapiens; identical to SEQ ID NO: 465051
  chr12:124879871-124880122
  hypo
  myeloid_neoplasm vs. head_and_neck, bladder_and_urothelial,anorectal

SEQ ID NO: 471601 - DNA, 74 bp, Homo sapiens
  chr12:124893329-124893403
  hypo
  myeloid_neoplasm vs. head_and_neck
cgaaggttacaagcactccaagggcattgcttcctgatcatctggctacatggagctacgaagtcatccgtgcc

SEQ ID NO: 471602 - DNA, 188 bp, Homo sapiens; identical to SEQ ID NO: 366127
  chr12:124893570-124893758
  hypo
  myeloid_neoplasm vs. head_and_neck

SEQ ID NO: 471603 - DNA, 178 bp, Homo sapiens; identical to SEQ ID NO: 354989
  chr12:124970986-124971164
  hypo
  myeloid_neoplasm vs. melanoma,breast

SEQ ID NO: 471604 - DNA, 286 bp, Homo sapiens; identical to SEQ ID NO: 341611
  chr12:125605555-125605841
  hypo
  myeloid_neoplasm vs. thyroid

SEQ ID NO: 471605 - DNA, 106 bp, Homo sapiens
  chr12:131623219-131623325
  hypo
  myeloid_neoplasm vs. thyroid
cgctcccacccattctcgcactccgcccccgcccgcagctgtgtgattttccatttgcttagggaccacgtctgccctgctccatgggagctggctggctcatggg

SEQ ID NO: 471606 - DNA, 145 bp, Homo sapiens; identical to SEQ ID NO: 215298
  chr12:131623397-131623542
  hypo
  myeloid_neoplasm vs. thyroid

SEQ ID NO: 471607 - DNA, 92 bp, Homo sapiens
  chr12:132329469-132329561
  hypo
  myeloid_neoplasm vs. sarcoma
cggcccccgcccgctgaagcggtggacaggcacccccgttttaatttgcctttagcagacctctaggcaaggataggggctccacacaagga

SEQ ID NO: 471608 - DNA, 280 bp, Homo sapiens; identical to SEQ ID NO: 341661
  chr12:132603391-132603671
  hypo
  myeloid_neoplasm vs. liver_bileduct, bladder_and_urothelial,melanoma

SEQ ID NO: 471609 - DNA, 915 bp, Homo sapiens; identical to SEQ ID NO: 341673
  chr12:133147764-133148679
  hypo
  myeloid_neoplasm vs. lymphoid_neoplasm

SEQ ID NO: 471610 - DNA, 136 bp, Homo sapiens
  chr12:133280443-133280579
  hypo
  myeloid_neoplasm vs. liver_bileduct,melanoma, bladder_and_urothelial,breast
cgggaatttagagaaggaagcagagacaactgagaagacagactggccgggaacacggaggatctgggatggaagaggggagagctgggaagccgcgcctctgagtagcgtgggggcagagtcgccatcctaggtg

SEQ ID NO: 471611 - DNA, 148 bp, Homo sapiens
  chr13:29913861-29914009
  hypo
  myeloid_neoplasm vs. thyroid
cgggcatagtcccagttgggaggagcggtgaggaggggccgggtgcggacccagcgcttcccattgacgtagacgactttgcagccatccttgacctgggagcggagaaggggcctggaccgcaaggcccggtgtttctgggattggg

SEQ ID NO: 471612 - DNA, 165 bp, Homo sapiens; identical to SEQ ID NO: 355043
  chr13:32526656-32526821
  hypo
  myeloid_neoplasm vs. pancreas_gallbladder,sarcoma, upper_gi,lung,uterine,ovary,lymphoid_neoplasm,prostate, head_and_neck

SEQ ID NO: 471613 - DNA, 237 bp, Homo sapiens; identical to SEQ ID NO: 341717
  chr13:32885424-32885661
  hypo
  myeloid_neoplasm vs. pancreas_gallbladder

SEQ ID NO: 471614 - DNA, 284 bp, Homo sapiens; identical to SEQ ID NO: 334760
  chr13:44544261-44544545
  hypo
  myeloid_neoplasm vs. melanoma,lung,head_and_neck, pancreas_gallbladder,colorectal

SEQ ID NO: 471615 - DNA, 89 bp, Homo sapiens; identical to SEQ ID NO: 341740
  chr13:52343302-52343391
  hypo
  myeloid_neoplasm vs. liver_bileduct

SEQ ID NO: 471616 - DNA, 915 bp, Homo sapiens; identical to SEQ ID NO: 351487
  chr13:74707668-74708583
  hypo
  myeloid_neoplasm vs. lymphoid_neoplasm

SEQ ID NO: 471617 - DNA, 152 bp, Homo sapiens; identical to SEQ ID NO: 366252
  chr13:98829232-98829384
  hypo
  myeloid_neoplasm vs. sarcoma

SEQ ID NO: 471618 - DNA, 352 bp, Homo sapiens
  chr13:98869699-98870051
  hypo
  myeloid_neoplasm vs. melanoma
cgtctacgaccgtcgtcgcaggaaatgatccttgtaactttctcgtgttgctgtcttgtcactgctgtactcgagcttttgtagctcctgagacttaagtagcattcatcctttgcctgaggatcaagtgtgggcttcgtagctcggggagcctgggagagagcaatgagcctccatggaggggccctgtacaccgggaggtgcctgggcaactcccatggctcatctcaaccacagtcctcggcggtttgttttctgcattagcttctcatgccagaacaccctcttatttgtttacctgcttagtgttggcctcttgcaggtagagtggccactccttggagggcaaggc

SEQ ID NO: 471619 - DNA, 220 bp, Homo sapiens; identical to SEQ ID NO: 348610
  chr13:98870098-98870318
  hypo
  myeloid_neoplasm vs. melanoma

SEQ ID NO: 471620 - DNA, 105 bp, Homo sapiens; identical to SEQ ID NO: 341771
  chr13:100068654-100068759
  hypo
  myeloid_neoplasm vs. liver_bileduct

SEQ ID NO: 471621 - DNA, 617 bp, Homo sapiens; identical to SEQ ID NO: 341781
  chr13:106912373-106912990
  hypo
  myeloid_neoplasm vs. bladder_and_urothelial

SEQ ID NO: 471622 - DNA, 181 bp, Homo sapiens; identical to SEQ ID NO: 341786
  chr13:110008382-110008563
  hypo
  myeloid_neoplasm vs. upper_gi,liver_bileduct

SEQ ID NO: 471623 - DNA, 95 bp, Homo sapiens; identical to SEQ ID NO: 355075
  chr13:110486576-110486671
  hypo
  myeloid_neoplasm vs. melanoma,thyroid

SEQ ID NO: 471624 - DNA, 204 bp, Homo sapiens; identical to SEQ ID NO: 341800
  chr13:112691506-112691710
  hypo
  myeloid_neoplasm vs. anorectal,thyroid,cervical,uterine

SEQ ID NO: 471625 - DNA, 134 bp, Homo sapiens; identical to SEQ ID NO: 341808
  chr13:113274734-113274868
  hypo
  myeloid_neoplasm vs. melanoma,upper_gi, pancreas_gallbladder

SEQ ID NO: 471626 - DNA, 282 bp, Homo sapiens; identical to SEQ ID NO: 341809
  chr13:113291506-113291788
  hypo
  myeloid_neoplasm vs. prostate

SEQ ID NO: 471627 - DNA, 35 bp, Homo sapiens; identical to SEQ ID NO: 465079
  chr13:113350364-113350399
  hypo
  myeloid_neoplasm vs. anorectal,sarcoma

SEQ ID NO: 471628 - DNA, 647 bp, Homo sapiens; identical to SEQ ID NO: 366287
  chr13:113350643-113351290
  hypo
  myeloid_neoplasm vs. anorectal,sarcoma

SEQ ID NO: 471629 - DNA, 318 bp, Homo sapiens; identical to SEQ ID NO: 366290
  chr13:113383516-113383834
  hypo
  myeloid_neoplasm vs. melanoma

SEQ ID NO: 471630 - DNA, 306 bp, Homo sapiens; identical to SEQ ID NO: 341818
  chr13:113477621-113477927
  hypo
  myeloid_neoplasm vs. lymphoid_neoplasm

SEQ ID NO: 471631 - DNA, 146 bp, Homo sapiens; identical to SEQ ID NO: 355089
  chr13:113508784-113508930
  hypo
  myeloid_neoplasm vs. lymphoid_neoplasm

SEQ ID NO: 471632 - DNA, 121 bp, Homo sapiens
  chr13:113825842-113825963
  hypo
  myeloid_neoplasm vs. melanoma,breast,renal,sarcoma, colorectal
cgtttgagcattatgtccccttgaaaatcagactgtaaagaactgacgattgttcatgatttcagattttaacagaacgagccaagacccgctgatgatcaagataacgcacgtccatgtg

SEQ ID NO: 471633 - DNA, 173 bp, Homo sapiens; identical to SEQ ID NO: 366307
  chr13:113825992-113826165
  hypo
  myeloid_neoplasm vs. melanoma,breast,renal,sarcoma, colorectal

SEQ ID NO: 471634 - DNA, 52 bp, Homo sapiens; identical to SEQ ID NO: 454737
  chr13:113984308-113984360
  hypo
  myeloid_neoplasm vs. liver_bileduct

SEQ ID NO: 471635 - DNA, 86 bp, Homo sapiens; identical to SEQ ID NO: 366310
  chr13:113984409-113984495
  hypo
  myeloid_neoplasm vs. liver_bileduct

SEQ ID NO: 471636 - DNA, 150 bp, Homo sapiens; identical to SEQ ID NO: 355106
  chr13:114616940-114617090
  hypo
  myeloid_neoplasm vs. bladder_and_urothelial,melanoma, head_and_neck,colorectal,uterine,pancreas_gallbladder,renal

SEQ ID NO: 471637 - DNA, 237 bp, Homo sapiens; identical to SEQ ID NO: 341886
  chr14:23315027-23315264
  hypo
  myeloid_neoplasm vs. pancreas_gallbladder,upper_gi, colorectal,lymphoid_neoplasm,ovary

SEQ ID NO: 471638 - DNA, 98 bp, Homo sapiens
  chr14:23884191-23884289
  hypo
  myeloid_neoplasm vs. sarcoma
cgcccgtcgcacctggtaggtgagctccttgatgcgccgctcgctcttcctcatgcccttcaccgactctgcgttgcgcttctgctcggcctccagct

SEQ ID NO: 471639 - DNA, 61 bp, Homo sapiens; identical to SEQ ID NO: 471026
  chr14:29236614-29236675
  hypo
  myeloid_neoplasm vs. uterine,head_and_neck,upper_gi, pancreas_gallbladder,lung

SEQ ID NO: 471640 - DNA, 119 bp, Homo sapiens; identical to SEQ ID NO: 341933
  chr14:64385274-64385393
  hypo
  myeloid_neoplasm vs. thyroid

SEQ ID NO: 471641 - DNA, 52 bp, Homo sapiens; identical to SEQ ID NO: 341942
  chr14:69070536-69070588
  hypo
  myeloid_neoplasm vs. liver_bileduct

SEQ ID NO: 471642 - DNA, 213 bp, Homo sapiens; identical to SEQ ID NO: 334953
  chr14:69259278-69259491
  hypo
  myeloid_neoplasm vs. multiple_myeloma,head_and_neck, lymphoid_neoplasm,pancreas_gallbladder

SEQ ID NO: 471643 - DNA, 409 bp, Homo sapiens; identical to SEQ ID NO: 360487
  chr14:74100394-74100803
  hypo
  myeloid_neoplasm vs. uterine,multiple_myeloma

SEQ ID NO: 471644 - DNA, 12 bp, Homo sapiens
  chr14:89938175-89938187
  hypo
  myeloid_neoplasm vs. thyroid,non_cancer,renal
cgtcatttgcac

SEQ ID NO: 471645 - DNA, 108 bp, Homo sapiens; identical to SEQ ID NO: 342003
  chr14:93415131-93415239
  hypo
  myeloid_neoplasm vs. renal,bladder_and_urothelial

SEQ ID NO: 471646 - DNA, 329 bp, Homo sapiens
  chr14:93425284-93425613
  hypo
  myeloid_neoplasm vs. head_and_neck, bladder_and_urothelial,anorectal,cervical,prostate
cgatgaggcgctgagaggttcagtgactgctggacagtgagtgagcccgggatggaactgggtctgcacagcacccagccgcgcccctacacacggagccatgtgatactccgcaaacaacaggcctttgtgctcctggtccccgactcctctggggaaaaaggtccctgacaggaggatctggtaggggctggggtagggagtgcaggggggcagctgccaaaaccctctcagccccggccagcacgggctctgcacagggtctgctctaaggacagaggggtgggccctaggcctagccgatccagctgctggtgccagggtcatgg

SEQ ID NO: 471647 - DNA, 14 bp, Homo sapiens
  chr14:93425642-93425656
  hypo
  myeloid_neoplasm vs. head_and_neck, bladder_and_urothelial,anorectal,cervical,prostate
aggagccaccagac

SEQ ID NO: 471648 - DNA, 192 bp, Homo sapiens; identical to SEQ ID NO: 380663
  chr14:101096264-101096456
  hypo
  myeloid_neoplasm vs. bladder_and_urothelial

SEQ ID NO: 471649 - DNA, 469 bp, Homo sapiens; identical to SEQ ID NO: 366465
  chr14:101200752-101201221
  hypo
  myeloid_neoplasm vs. colorectal,anorectal, lymphoid_neoplasm,non_cancer,bladder_and_urothelial,prostate, renal

SEQ ID NO: 471650 - DNA, 183 bp, Homo sapiens; identical to SEQ ID NO: 342037
  chr14:101492091-101492274
  hypo
  myeloid_neoplasm vs. pancreas_gallbladder,uterine, head_and_neck,upper_gi

SEQ ID NO: 471651 - DNA, 204 bp, Homo sapiens; identical to SEQ ID NO: 342038
  chr14:101970419-101970623
  hypo
  myeloid_neoplasm vs. sarcoma

SEQ ID NO: 471652 - DNA, 495 bp, Homo sapiens; identical to SEQ ID NO: 380671
  chr14:102068306-102068801
  hypo
  myeloid_neoplasm vs. cervical

SEQ ID NO: 471653 - DNA, 362 bp, Homo sapiens; identical to SEQ ID NO: 366478
  chr14:102523351-102523713
  hypo
  myeloid_neoplasm vs. cervical,prostate,melanoma

SEQ ID NO: 471654 - DNA, 377 bp, Homo sapiens; identical to SEQ ID NO: 351623
  chr14:102975682-102976059
  hypo
  myeloid_neoplasm vs. lung,head_and_neck,ovary,uterine, colorectal,bladder_and_urothelial,breast,sarcoma,melanoma, non_cancer

SEQ ID NO: 471655 - DNA, 22 bp, Homo sapiens
  chr14:103216371-103216393
  hypo
  myeloid_neoplasm vs. sarcoma
cggtccccgcggcctcggtccc

SEQ ID NO: 471656 - DNA, 241 bp, Homo sapiens; identical to SEQ ID NO: 342065
  chr14:103433137-103433378
  hypo
  myeloid_neoplasm vs. upper_gi

SEQ ID NO: 471657 - DNA, 130 bp, Homo sapiens; identical to SEQ ID NO: 456501
  chr14:104159892-104160022
  hypo
  myeloid_neoplasm vs. melanoma

SEQ ID NO: 471658 - DNA, 3 bp, Homo sapiens
  chr14:104160058-104160061
  hypo
  myeloid_neoplasm vs. melanoma
cct

SEQ ID NO: 471659 - DNA, 123 bp, Homo sapiens; identical to SEQ ID NO: 355201
  chr14:104160134-104160257
  hypo
  myeloid_neoplasm vs. melanoma

SEQ ID NO: 471660 - DNA, 152 bp, Homo sapiens; identical to SEQ ID NO: 471034
  chr14:105196121-105196273
  hypo
  myeloid_neoplasm vs. melanoma,bladder_and_urothelial, ovary,renal,uterine,head_and_neck,prostate,lymphoid_neoplasm, breast

SEQ ID NO: 471661 - DNA, 19 bp, Homo sapiens
  chr14:105196545-105196564
  hypo
  myeloid_neoplasm vs. melanoma,bladder_and_urothelial, ovary,renal,uterine,head_and_neck,prostate,lymphoid_neoplasm, breast
agcgggtgggtgcggtggc

SEQ ID NO: 471662 - DNA, 163 bp, Homo sapiens; identical to SEQ ID NO: 342102
  chr14:105247313-105247476
  hypo
  myeloid_neoplasm vs. sarcoma

SEQ ID NO: 471663 - DNA, 333 bp, Homo sapiens; identical to SEQ ID NO: 380746
  chr14:105611103-105611436
  hypo
  myeloid_neoplasm vs. head_and_neck

SEQ ID NO: 471664 - DNA, 38 bp, Homo sapiens
  chr14:105723707-105723745
  hypo
  myeloid_neoplasm vs. sarcoma
cgcaagaacctcgcaagcaatcagatggttaggacgcc

SEQ ID NO: 471665 - DNA, 250 bp, Homo sapiens; identical to SEQ ID NO: 366530
  chr14:105723873-105724123
  hypo
  myeloid_neoplasm vs. sarcoma

SEQ ID NO: 471666 - DNA, 144 bp, Homo sapiens; identical to SEQ ID NO: 355226
  chr15:26234718-26234862
  hypo
  myeloid_neoplasm vs. anorectal

SEQ ID NO: 471667 - DNA, 507 bp, Homo sapiens; identical to SEQ ID NO: 351653
  chr15:31774606-31775113
  hypo
  myeloid_neoplasm vs. prostate,colorectal,breast, lymphoid_neoplasm,bladder_and_urothelial,non_cancer,renal, uterine

SEQ ID NO: 471668 - DNA, 133 bp, Homo sapiens; identical to SEQ ID NO: 342162
  chr15:42162038-42162171
  hypo
  myeloid_neoplasm vs. bladder_and_urothelial

SEQ ID NO: 471669 - DNA, 782 bp, Homo sapiens; identical to SEQ ID NO: 351688
  chr15:60884567-60885349
  hypo
  myeloid_neoplasm vs. pancreas_gallbladder,cervical

SEQ ID NO: 471670 - DNA, 132 bp, Homo sapiens; identical to SEQ ID NO: 342197
  chr15:62978897-62979029
  hypo
  myeloid_neoplasm vs. thyroid

SEQ ID NO: 471671 - DNA, 741 bp, Homo sapiens; identical to SEQ ID NO: 342208
  chr15:63089582-63090323
  hypo
  myeloid_neoplasm vs. head_and_neck,uterine, bladder_and_urothelial,melanoma,renal

SEQ ID NO: 471672 - DNA, 203 bp, Homo sapiens; identical to SEQ ID NO: 335142
  chr15:64454743-64454946
  hypo
  myeloid_neoplasm vs. multiple_myeloma

SEQ ID NO: 471673 - DNA, 115 bp, Homo sapiens; identical to SEQ ID NO: 342224
  chr15:68888212-68888327
  hypo
  myeloid_neoplasm vs. melanoma

SEQ ID NO: 471674 - DNA, 174 bp, Homo sapiens; identical to SEQ ID NO: 342227
  chr15:68937507-68937681
  hypo
  myeloid_neoplasm vs. bladder_and_urothelial,sarcoma

SEQ ID NO: 471675 - DNA, 214 bp, Homo sapiens; identical to SEQ ID NO: 366624
  chr15:70718600-70718814
  hypo
  myeloid_neoplasm vs. lung,pancreas_gallbladder, lymphoid_neoplasm

SEQ ID NO: 471676 - DNA, 209 bp, Homo sapiens; identical to SEQ ID NO: 366632
  chr15:73615717-73615926
  hypo

SEQ ID NO: 471677 - DNA, 196 bp, Homo sapiens; identical to SEQ ID NO: 347353
  chr15:81294105-81294301
  hypo
  myeloid_neoplasm vs. liver_bileduct,lymphoid_neoplasm, pancreas_gallbladder,lung,ovary,upper_gi,bladder_and_urothelial, breast,head_and_neck,prostate,sarcoma,multiple_myeloma,melanoma, renal,uterine,cervical,colorectal,non_cancer,anorectal,thyroid

SEQ ID NO: 471678 - DNA, 83 bp, Homo sapiens; identical to SEQ ID NO: 366648
  chr15:83523579-83523662
  hypo
  myeloid_neoplasm vs. liver_bileduct

SEQ ID NO: 471679 - DNA, 181 bp, Homo sapiens; identical to SEQ ID NO: 360728
  chr15:84323434-84323615
  hypo
  myeloid_neoplasm vs. prostate

SEQ ID NO: 471680 - DNA, 98 bp, Homo sapiens; identical to SEQ ID NO: 342277
  chr15:90746768-90746866
  hypo
  myeloid_neoplasm vs. liver_bileduct

SEQ ID NO: 471681 - DNA, 297 bp, Homo sapiens; identical to SEQ ID NO: 348676
  chr15:91840031-91840328
  hypo
  myeloid_neoplasm vs. sarcoma,anorectal,prostate,uterine

SEQ ID NO: 471682 - DNA, 104 bp, Homo sapiens; identical to SEQ ID NO: 471054
  chr15:92459227-92459331
  hypo
  myeloid_neoplasm vs. melanoma,head_and_neck, bladder_and_urothelial,ovary,upper_gi,breast

SEQ ID NO: 471683 - DNA, 225 bp, Homo sapiens; identical to SEQ ID NO: 463383
  chr15:99256133-99256358
  hypo
  myeloid_neoplasm vs. thyroid

SEQ ID NO: 471684 - DNA, 453 bp, Homo sapiens; identical to SEQ ID NO: 342300
  chr15:99434503-99434956
  hypo
  myeloid_neoplasm vs. head_and_neck,breast

SEQ ID NO: 471685 - DNA, 322 bp, Homo sapiens; identical to SEQ ID NO: 463387
  chr15:99459893-99460215
  hypo
  myeloid_neoplasm vs. cervical,melanoma

SEQ ID NO: 471686 - DNA, 4 bp, Homo sapiens
  chr15:99460268-99460272
  hypo
  myeloid_neoplasm vs. cervical,melanoma
ctgc

SEQ ID NO: 471687 - DNA, 209 bp, Homo sapiens; identical to SEQ ID NO: 342305
  chr15:99465447-99465656
  hypo
  myeloid_neoplasm vs. sarcoma,lung,uterine, bladder_and_urothelial

SEQ ID NO: 471688 - DNA, 157 bp, Homo sapiens; identical to SEQ ID NO: 342316
  chr15:101845367-101845524
  hypo
  myeloid_neoplasm vs. liver_bileduct

SEQ ID NO: 471689 - DNA, 152 bp, Homo sapiens; identical to SEQ ID NO: 355314
  chr15:102043329-102043481
  hypo
  myeloid_neoplasm vs. sarcoma,bladder_and_urothelial

SEQ ID NO: 471690 - DNA, 544 bp, Homo sapiens; identical to SEQ ID NO: 342321
  chr15:102076822-102077366
  hypo
  myeloid_neoplasm vs. renal,colorectal,breast,prostate, non_cancer,uterine

SEQ ID NO: 471691 - DNA, 49 bp, Homo sapiens; identical to SEQ ID NO: 453671
  chr16:468053-468102
  hypo
  myeloid_neoplasm vs. liver_bileduct

SEQ ID NO: 471692 - DNA, 36 bp, Homo sapiens; identical to SEQ ID NO: 380960
  chr16:468131-468167
  hypo
  myeloid_neoplasm vs. liver_bileduct

SEQ ID NO: 471693 - DNA, 238 bp, Homo sapiens
  chr16:945437-945675
  hypo
  myeloid_neoplasm vs. thyroid,renal
cgggagggccttcggggcggccgtgggcccctagccggggccaggcaggacgggagccgccgggttctctggctacatgtgaccgagaaggcagcaggctctgctgctgtctgtgcaggacgacctgggcaggggaggggcgtgtccaattccaacgtgtttggaacatggggctcgcgagactggcgggggagtgggagagccaggagaggctgcaccgcgccctgaaggacggcac

SEQ ID NO: 471694 - DNA, 16 bp, Homo sapiens
  chr16:945732-945748
  hypo
  myeloid_neoplasm vs. thyroid,renal
accaagagcccagccc

SEQ ID NO: 471695 - DNA, 179 bp, Homo sapiens; identical to SEQ ID NO: 360766
  chr16:1035474-1035653
  hypo

SEQ ID NO: 471696 - DNA, 224 bp, Homo sapiens
  chr16:1061203-1061427
  hypo
  myeloid_neoplasm vs. upper_gi,lung,lymphoid_neoplasm, uterine,bladder_and_urothelial,head_and_neck
cggccagggcagagacgtaggacagagacgcagcgcagagcggccagggcagagatgcagggcagagacacagcgtagagcggccagggcagagacgcagggcagagacgcagggcagagacacagggcagagacgcagggcaaagcggcagggcagagacgcagggcaaagcggcagggcagagacgcagggcaaagcggcagggcagagacgcagggcaaag

SEQ ID NO: 471697 - DNA, 12 bp, Homo sapiens
  chr16:1061520-1061532
  hypo
  myeloid_neoplasm vs. upper_gi,lung,lymphoid_neoplasm, uterine,bladder_and_urothelial,head_and_neck
gcagggcagagc

SEQ ID NO: 471698 - DNA, 385 bp, Homo sapiens; identical to SEQ ID NO: 355348
  chr16:1397859-1398244
  hypo
  myeloid_neoplasm vs. upper_gi,liver_bileduct

SEQ ID NO: 471699 - DNA, 75 bp, Homo sapiens
  chr16:1400771-1400846
  hypo
  myeloid_neoplasm vs. anorectal
cgccgggtcacactgctgtggggcccctggactcacctacgatgcagaaggtggcagcaaacgcttccacgcagg

SEQ ID NO: 471700 - DNA, 133 bp, Homo sapiens; identical to SEQ ID NO: 453675
  chr16:1424307-1424440
  hypo
  myeloid_neoplasm vs. melanoma

SEQ ID NO: 471701 - DNA, 177 bp, Homo sapiens; identical to SEQ ID NO: 355350
  chr16:1424469-1424646
  hypo
  myeloid_neoplasm vs. melanoma

SEQ ID NO: 471702 - DNA, 233 bp, Homo sapiens
  chr16:1493342-1493575
  hypo
  myeloid_neoplasm vs. lung,head_and_neck, bladder_and_urothelial,liver_bileduct,sarcoma,ovary,colorectal, lymphoid_neoplasm,cervical,pancreas_gallbladder
cgggtctggcacctgcccctggagtccacccagctccggcaccactggcccctgggagctctgggcctgggcagcaggggtgagctgggctccaggcccagaagcagctgcccccaacacccaggaaaggggcagctcgacctgtgggtgggggagccgctcacctccggcgcctccttttcgggggcctgggctgccggccgcgcctcctgctgcaactgcctcagctctga

SEQ ID NO: 471703 - DNA, 563 bp, Homo sapiens; identical to SEQ ID NO: 355355
  chr16:1493691-1494254
  hypo
  myeloid_neoplasm vs. lung,head_and_neck, bladder_and_urothelial,liver_bileduct,sarcoma,ovary,colorectal, lymphoid_neoplasm,cervical,pancreas_gallbladder

SEQ ID NO: 471704 - DNA, 422 bp, Homo sapiens; identical to SEQ ID NO: 342391
  chr16:1682411-1682833
  hypo
  myeloid_neoplasm vs. anorectal

SEQ ID NO: 471705 - DNA, 865 bp, Homo sapiens
  chr16:1796445-1797310
  hypo
  myeloid_neoplasm vs. sarcoma
cgcttgctcatgttcaggggtgagctctggtccagtcaagccacagggtcagcaccttctggtcactccctggccctgacctgagcccggggaggaacgtggggcaggcgcgggtgggcccagcctcgagctcttcagcacagtgatggtgacggggcagcggtggcggcacagccagcccttcttgggtccccagtcagagccctctgccctacctgggctggacttgtttctgaacagccacaagctacagggggctgccgctgtgtccctggcgaggcactggcccattacaagcaatcgtctggggagggcaccagtggaaagccccgttccaagccatttcaggagggtggccctgcttccgaggagccggagtcagtggccggataagcagagccactcgggagtggtgaggcccggaagggttagcccggtgggcggcagaggagctctggcccgcagggtgtcgggcgaggcaaagtgcaaagcattggtgcgcggggcctcaggcagccacggcggagccgcaggccagggacctgcagtgactcgctctccctcctccctgtgtttggccttagtgtccacaggatgaaatgtccgagtcaggccagtcctcggcggccgccacacccagcaccacaggcaccaagtccaacacgcccacatcctccgtgccctcggccgccgtcacacccctcaacgagagcctgcagcccctgggggactatggcgtgggctccaagaacagcaagcgtgcccgggagaagcgcgacagccgcaacatggaagtacaggtcacccaggagatgcgcaacgtcagtataggtgggtgcccacctccgggactctgggctccctc

SEQ ID NO: 471706 - DNA, 160 bp, Homo sapiens; identical to SEQ ID NO: 460113
  chr16:1807721-1807881
  hypo
  myeloid_neoplasm vs. sarcoma,ovary

SEQ ID NO: 471707 - DNA, 431 bp, Homo sapiens; identical to SEQ ID NO: 366762
  chr16:1807999-1808430
  hypo
  myeloid_neoplasm vs. sarcoma,ovary

SEQ ID NO: 471708 - DNA, 217 bp, Homo sapiens; identical to SEQ ID NO: 458665
  chr16:1814037-1814254
  hypo
  myeloid_neoplasm vs. melanoma,renal

SEQ ID NO: 471709 - DNA, 112 bp, Homo sapiens; identical to SEQ ID NO: 355365
  chr16:1814369-1814481
  hypo
  myeloid_neoplasm vs. melanoma,renal

SEQ ID NO: 471710 - DNA, 75 bp, Homo sapiens
  chr16:2104688-2104763
  hypo
  myeloid_neoplasm vs. melanoma,sarcoma, bladder_and_urothelial,cervical,renal,head_and_neck,colorectal, non_cancer,lymphoid_neoplasm,pancreas_gallbladder,prostate
cgaacacctctgcaacggcaggagctgggcgagttctgtcactgggaggtggtgctgctgacttggtctcaaccg

SEQ ID NO: 471711 - DNA, 187 bp, Homo sapiens; identical to SEQ ID NO: 348702
  chr16:2105384-2105571
  hypo
  myeloid_neoplasm vs. melanoma,sarcoma, bladder_and_urothelial,cervical,renal,head_and_neck,colorectal, non_cancer,lymphoid_neoplasm,pancreas_gallbladder,prostate

SEQ ID NO: 471712 - DNA, 183 bp, Homo sapiens; identical to SEQ ID NO: 355374
  chr16:2129581-2129764
  hypo
  myeloid_neoplasm vs. liver_bileduct,sarcoma,melanoma

SEQ ID NO: 471713 - DNA, 135 bp, Homo sapiens; identical to SEQ ID NO: 342431
  chr16:2544830-2544965
  hypo
  myeloid_neoplasm vs. melanoma,ovary,sarcoma,anorectal, pancreas_gallbladder,breast,bladder_and_urothelial, head_and_neck,prostate,upper_gi,uterine,non_cancer,renal, colorectal

SEQ ID NO: 471714 - DNA, 3 bp, Homo sapiens
  chr16:4203909-4203912
  hypo
  myeloid_neoplasm vs. thyroid,melanoma,liver_bileduct, lymphoid_neoplasm,head_and_neck,lung,colorectal, bladder_and_urothelial,prostate
cga

SEQ ID NO: 471715 - DNA, 193 bp, Homo sapiens; identical to SEQ ID NO: 348725
  chr16:4203995-4204188
  hypo
  myeloid_neoplasm vs. thyroid,melanoma,liver_bileduct, lymphoid_neoplasm,head_and_neck,lung,colorectal, bladder_and_urothelial,prostate

SEQ ID NO: 471716 - DNA, 187 bp, Homo sapiens; identical to SEQ ID NO: 335276
  chr16:4234090-4234277
  hypo
  myeloid_neoplasm vs. liver_bileduct

SEQ ID NO: 471717 - DNA, 814 bp, Homo sapiens; identical to SEQ ID NO: 335283
  chr16:8767901-8768715
  hypo
  myeloid_neoplasm vs. pancreas_gallbladder,liver_bileduct, upper_gi,colorectal,multiple_myeloma,ovary,lymphoid_neoplasm, prostate,head_and_neck,non_cancer,lung,uterine,breast,thyroid

SEQ ID NO: 471718 - DNA, 298 bp, Homo sapiens; identical to SEQ ID NO: 335285
  chr16:9186882-9187180
  hypo
  myeloid_neoplasm vs. liver_bileduct,lung, multiple_myeloma,ovary,upper_gi,pancreas_gallbladder,non_cancer, prostate,melanoma,lymphoid_neoplasm,colorectal,breast,cervical, head_and_neck,renal,anorectal,thyroid,uterine,
  CONT. FROM ABOVE: bladder_and_urothelial

SEQ ID NO: 471719 - DNA, 587 bp, Homo sapiens; identical to SEQ ID NO: 342488
  chr16:11219568-11220155
  hypo
  myeloid_neoplasm vs. prostate,breast,head_and_neck,renal, liver_bileduct,upper_gi,uterine,bladder_and_urothelial, non_cancer,lung,colorectal,pancreas_gallbladder

SEQ ID NO: 471720 - DNA, 118 bp, Homo sapiens; identical to SEQ ID NO: 456558
  chr16:19708387-19708505
  hypo
  myeloid_neoplasm vs. sarcoma,melanoma,cervical, lymphoid_neoplasm,colorectal,bladder_and_urothelial,renal

SEQ ID NO: 471721 - DNA, 47 bp, Homo sapiens; identical to SEQ ID NO: 216831
  chr16:19708561-19708608
  hypo
  myeloid_neoplasm vs. sarcoma,melanoma,cervical, lymphoid_neoplasm,colorectal,bladder_and_urothelial,renal

SEQ ID NO: 471722 - DNA, 1 bp, Homo sapiens
  chr16:19883197-19883198
  hypo
  myeloid_neoplasm vs. cervical,head_and_neck,sarcoma
c

SEQ ID NO: 471723 - DNA, 100 bp, Homo sapiens; identical to SEQ ID NO: 342542
  chr16:28925777-28925877
  hypo
  myeloid_neoplasm vs. liver_bileduct

SEQ ID NO: 471724 - DNA, 31 bp, Homo sapiens; identical to SEQ ID NO: 456564
  chr16:29153254-29153285
  hypo

SEQ ID NO: 471725 - DNA, 55 bp, Homo sapiens; identical to SEQ ID NO: 456565
  chr16:29153320-29153375
  hypo

SEQ ID NO: 471726 - DNA, 163 bp, Homo sapiens; identical to SEQ ID NO: 342545
  chr16:29231876-29232039
  hypo
  myeloid_neoplasm vs. multiple_myeloma

SEQ ID NO: 471727 - DNA, 549 bp, Homo sapiens; identical to SEQ ID NO: 347378
  chr16:30959765-30960314
  hypo
  myeloid_neoplasm vs. liver_bileduct,pancreas_gallbladder, upper_gi,colorectal,sarcoma,lung,ovary,breast,cervical,renal, bladder_and_urothelial,prostate,non_cancer,multiple_myeloma, uterine,melanoma,anorectal,head_and_neck,thyroid

SEQ ID NO: 471728 - DNA, 201 bp, Homo sapiens; identical to SEQ ID NO: 456569
  chr16:31138407-31138608
  hypo
  myeloid_neoplasm vs. bladder_and_urothelial

SEQ ID NO: 471729 - DNA, 507 bp, Homo sapiens; identical to SEQ ID NO: 342569
  chr16:46683305-46683812
  hypo
  myeloid_neoplasm vs. melanoma,cervical,lymphoid_neoplasm

SEQ ID NO: 471730 - DNA, 876 bp, Homo sapiens; identical to SEQ ID NO: 465223
  chr16:58030638-58031514
  hypo
  myeloid_neoplasm vs. liver_bileduct

SEQ ID NO: 471731 - DNA, 132 bp, Homo sapiens; identical to SEQ ID NO: 360851
  chr16:67184509-67184641
  hypo
  myeloid_neoplasm vs. pancreas_gallbladder,colorectal, head_and_neck,ovary,lung

SEQ ID NO: 471732 - DNA, 24 bp, Homo sapiens
  chr16:67981981-67982005
  hypo
  myeloid_neoplasm vs. pancreas_gallbladder
cggggccgccagttgggggtcctc

SEQ ID NO: 471733 - DNA, 66 bp, Homo sapiens; identical to SEQ ID NO: 468836
  chr16:68269820-68269886
  hypo
  myeloid_neoplasm vs. pancreas_gallbladder,lung, multiple_myeloma,ovary,breast,uterine,liver_bileduct,prostate, cervical,colorectal,anorectal,thyroid,head_and_neck, bladder_and_urothelial,upper_gi,non_cancer,renal

SEQ ID NO: 471734 - DNA, 113 bp, Homo sapiens; identical to SEQ ID NO: 468837
  chr16:68269896-68270009
  hypo
  myeloid_neoplasm vs. pancreas_gallbladder,lung, multiple_myeloma,ovary,breast,uterine,liver_bileduct,prostate, cervical,colorectal,anorectal,thyroid,head_and_neck, bladder_and_urothelial,upper_gi,non_cancer,renal

SEQ ID NO: 471735 - DNA, 106 bp, Homo sapiens; identical to SEQ ID NO: 468838
  chr16:68270022-68270128
  hypo
  myeloid_neoplasm vs. pancreas_gallbladder,lung, multiple_myeloma,ovary,breast,uterine,liver_bileduct,prostate, cervical,colorectal,anorectal,thyroid,head_and_neck, bladder_and_urothelial,upper_gi,non_cancer,renal

SEQ ID NO: 471736 - DNA, 125 bp, Homo sapiens; identical to SEQ ID NO: 347388
  chr16:68270157-68270282
  hypo
  myeloid_neoplasm vs. pancreas_gallbladder,lung, multiple_myeloma,ovary,breast,uterine,liver_bileduct,prostate, cervical,colorectal,anorectal,thyroid,head_and_neck, bladder_and_urothelial,upper_gi,non_cancer,renal

SEQ ID NO: 471737 - DNA, 637 bp, Homo sapiens; identical to SEQ ID NO: 347389
  chr16:68270868-68271505
  hypo
  myeloid_neoplasm vs. melanoma,renal,breast,colorectal, uterine,ovary,prostate,multiple_myeloma,pancreas_gallbladder, non_cancer,anorectal,liver_bileduct,thyroid,upper_gi, head_and_neck,bladder_and_urothelial,lung

SEQ ID NO: 471738 - DNA, 48 bp, Homo sapiens; identical to SEQ ID NO: 366969
  chr16:72460075-72460123
  hypo
  myeloid_neoplasm vs. cervical,head_and_neck,colorectal

SEQ ID NO: 471739 - DNA, 350 bp, Homo sapiens; identical to SEQ ID NO: 342647
  chr16:75136341-75136691
  hypo
  myeloid_neoplasm vs. sarcoma

SEQ ID NO: 471740 - DNA, 9 bp, Homo sapiens
  chr16:75263542-75263551
  hypo
  myeloid_neoplasm vs. melanoma,lymphoid_neoplasm, colorectal,multiple_myeloma,lung,pancreas_gallbladder,thyroid, bladder_and_urothelial,upper_gi,cervical
cgatgccgc

SEQ ID NO: 471741 - DNA, 284 bp, Homo sapiens; identical to SEQ ID NO: 342652
  chr16:77227386-77227670
  hypo
  myeloid_neoplasm vs. thyroid

SEQ ID NO: 471742 - DNA, 213 bp, Homo sapiens; identical to SEQ ID NO: 342665
  chr16:81533335-81533548
  hypo
  myeloid_neoplasm vs. head_and_neck,sarcoma

SEQ ID NO: 471743 - DNA, 47 bp, Homo sapiens; identical to SEQ ID NO: 381314
  chr16:81765480-81765527
  hypo
  myeloid_neoplasm vs. pancreas_gallbladder,colorectal

SEQ ID NO: 471744 - DNA, 280 bp, Homo sapiens; identical to SEQ ID NO: 342686
  chr16:84998400-84998680
  hypo
  myeloid_neoplasm vs. upper_gi

SEQ ID NO: 471745 - DNA, 178 bp, Homo sapiens; identical to SEQ ID NO: 452923
  chr16:85932121-85932299
  hypo
  myeloid_neoplasm vs. thyroid,non_cancer,colorectal, multiple_myeloma

SEQ ID NO: 471746 - DNA, 39 bp, Homo sapiens
  chr16:86903437-86903476
  hypo
  myeloid_neoplasm vs. anorectal
cgtagaggtgacggcggcgcaggcgcagtttagaactgc

SEQ ID NO: 471747 - DNA, 1 bp, Homo sapiens
  chr16:86903513-86903514
  hypo
  myeloid_neoplasm vs. anorectal
c

SEQ ID NO: 471748 - DNA, 426 bp, Homo sapiens; identical to SEQ ID NO: 342729
  chr16:87744572-87744998
  hypo
  myeloid_neoplasm vs. liver_bileduct,lymphoid_neoplasm, pancreas_gallbladder,colorectal,uterine,prostate,head_and_neck, ovary,sarcoma,melanoma

SEQ ID NO: 471749 - DNA, 328 bp, Homo sapiens; identical to SEQ ID NO: 342740
  chr16:88111298-88111626
  hypo
  myeloid_neoplasm vs. multiple_myeloma,lung

SEQ ID NO: 471750 - DNA, 518 bp, Homo sapiens; identical to SEQ ID NO: 465247
  chr16:88792758-88793276
  hypo
  myeloid_neoplasm vs. melanoma,colorectal,prostate, cervical,bladder_and_urothelial,breast,upper_gi,non_cancer, head_and_neck

SEQ ID NO: 471751 - DNA, 29 bp, Homo sapiens
  chr16:88793673-88793702
  hypo
  myeloid_neoplasm vs. melanoma,colorectal,prostate, cervical,bladder_and_urothelial,breast,upper_gi,non_cancer, head_and_neck
tcccaccccaggcctgtcggcgtgcagcc

SEQ ID NO: 471752 - DNA, 58 bp, Homo sapiens; identical to SEQ ID NO: 465249
  chr16:88793218-88793276
  hypo
  myeloid_neoplasm vs. colorectal

SEQ ID NO: 471753 - DNA, 340 bp, Homo sapiens; identical to SEQ ID NO: 465250
  chr16:88793673-88794013
  hypo
  myeloid_neoplasm vs. colorectal

SEQ ID NO: 471754 - DNA, 279 bp, Homo sapiens; identical to SEQ ID NO: 348772
  chr16:88946079-88946358
  hypo
  myeloid_neoplasm vs. sarcoma,non_cancer

SEQ ID NO: 471755 - DNA, 49 bp, Homo sapiens
  chr16:89202519-89202568
  hypo
  myeloid_neoplasm vs. anorectal,renal,head_and_neck, non_cancer
cgttttcttctttgaaagcacaggaaccacagccctgtggattttgcga

SEQ ID NO: 471756 - DNA, 112 bp, Homo sapiens; identical to SEQ ID NO: 355548
  chr16:89203215-89203327
  hypo
  myeloid_neoplasm vs. anorectal,renal,head_and_neck, non_cancer

SEQ ID NO: 471757 - DNA, 210 bp, Homo sapiens; identical to SEQ ID NO: 342790
  chr16:89354795-89355005
  hypo
  myeloid_neoplasm vs. multiple_myeloma

SEQ ID NO: 471758 - DNA, 145 bp, Homo sapiens; identical to SEQ ID NO: 335426
  chr17:850237-850382
  hypo
  myeloid_neoplasm vs. anorectal,cervical

SEQ ID NO: 471759 - DNA, 53 bp, Homo sapiens; identical to SEQ ID NO: 381474
  chr17:1451516-1451569
  hypo
  myeloid_neoplasm vs. lung

SEQ ID NO: 471760 - DNA, 272 bp, Homo sapiens; identical to SEQ ID NO: 342828
  chr17:1775571-1775843
  hypo
  myeloid_neoplasm vs. sarcoma

SEQ ID NO: 471761 - DNA, 87 bp, Homo sapiens; identical to SEQ ID NO: 342845
  chr17:3985702-3985789
  hypo
  myeloid_neoplasm vs. lung,upper_gi

SEQ ID NO: 471762 - DNA, 74 bp, Homo sapiens; identical to SEQ ID NO: 461630
  chr17:4436345-4436419
  hypo
  myeloid_neoplasm vs. anorectal,liver_bileduct,sarcoma, melanoma

SEQ ID NO: 471763 - DNA, 164 bp, Homo sapiens; identical to SEQ ID NO: 355576
  chr17:4436450-4436614
  hypo
  myeloid_neoplasm vs. anorectal,liver_bileduct,sarcoma, melanoma

SEQ ID NO: 471764 - DNA, 238 bp, Homo sapiens; identical to SEQ ID NO: 342854
  chr17:4685696-4685934
  hypo
  myeloid_neoplasm vs. liver_bileduct

SEQ ID NO: 471765 - DNA, 341 bp, Homo sapiens; identical to SEQ ID NO: 335442
  chr17:4890368-4890709
  hypo
  myeloid_neoplasm vs. upper_gi,liver_bileduct, multiple_myeloma,ovary,bladder_and_urothelial,lymphoid_neoplasm, lung,breast,colorectal,cervical,pancreas_gallbladder,prostate, head_and_neck,non_cancer,uterine,anorectal

SEQ ID NO: 471766 - DNA, 919 bp, Homo sapiens; identical to SEQ ID NO: 471079
  chr17:7254483-7255402
  hypo
  myeloid_neoplasm vs. liver_bileduct,uterine,upper_gi, head_and_neck,ovary,anorectal,lung,renal,melanoma,breast, bladder_and_urothelial,colorectal,sarcoma,pancreas_gallbladder, cervical,prostate,non_cancer,lymphoid_neoplasm,thyroid,
  CONT. FROM ABOVE: multiple_myeloma

SEQ ID NO: 471767 - DNA, 920 bp, Homo sapiens; identical to SEQ ID NO: 471080
  chr17:7254908-7255828
  hypo
  myeloid_neoplasm vs. renal,pancreas_gallbladder,ovary, bladder_and_urothelial,upper_gi,colorectal,breast,head_and_neck, lung,uterine,melanoma,lymphoid_neoplasm,sarcoma,thyroid, liver_bileduct,prostate,anorectal,multiple_myeloma,non_cancer,
  CONT. FROM ABOVE: cervical

SEQ ID NO: 471768 - DNA, 282 bp, Homo sapiens; identical to SEQ ID NO: 342865
  chr17:7320371-7320653
  hypo
  myeloid_neoplasm vs. sarcoma,bladder_and_urothelial, melanoma,uterine,renal

SEQ ID NO: 471769 - DNA, 261 bp, Homo sapiens; identical to SEQ ID NO: 342874
  chr17:8012317-8012578
  hypo
  myeloid_neoplasm vs. sarcoma,cervical,colorectal,breast, bladder_and_urothelial,prostate,ovary,anorectal,renal

SEQ ID NO: 471770 - DNA, 186 bp, Homo sapiens; identical to SEQ ID NO: 342883
  chr17:8977478-8977664
  hypo
  myeloid_neoplasm vs. prostate,pancreas_gallbladder, upper_gi,breast,bladder_and_urothelial,cervical,colorectal, sarcoma,lung,uterine,lymphoid_neoplasm,renal,non_cancer

SEQ ID NO: 471771 - DNA, 186 bp, Homo sapiens; identical to SEQ ID NO: 342884
  chr17:9233928-9234114
  hypo
  myeloid_neoplasm vs. head_and_neck

SEQ ID NO: 471772 - DNA, 76 bp, Homo sapiens; identical to SEQ ID NO: 471082
  chr17:14212398-14212474
  hypo
  myeloid_neoplasm vs. anorectal,thyroid

SEQ ID NO: 471773 - DNA, 25 bp, Homo sapiens
  chr17:14212686-14212711
  hypo
  myeloid_neoplasm vs. anorectal,thyroid
ggccacgtgaccagcctcgccgtcc

SEQ ID NO: 471774 - DNA, 300 bp, Homo sapiens; identical to SEQ ID NO: 335481
  chr17:19140744-19141044
  hypo
  myeloid_neoplasm vs. liver_bileduct,multiple_myeloma

SEQ ID NO: 471775 - DNA, 130 bp, Homo sapiens; identical to SEQ ID NO: 342919
  chr17:19623347-19623477
  hypo

SEQ ID NO: 471776 - DNA, 338 bp, Homo sapiens; identical to SEQ ID NO: 342920
  chr17:19646495-19646833
  hypo
  myeloid_neoplasm vs. melanoma,ovary

SEQ ID NO: 471777 - DNA, 101 bp, Homo sapiens; identical to SEQ ID NO: 367195
  chr17:19771712-19771813
  hypo
  myeloid_neoplasm vs. ovary

SEQ ID NO: 471778 - DNA, 300 bp, Homo sapiens; identical to SEQ ID NO: 342933
  chr17:26851601-26851901
  hypo
  myeloid_neoplasm vs. bladder_and_urothelial

SEQ ID NO: 471779 - DNA, 226 bp, Homo sapiens; identical to SEQ ID NO: 347425
  chr17:36886750-36886976
  hypo
  myeloid_neoplasm vs. multiple_myeloma,colorectal, upper_gi,lung,bladder_and_urothelial,pancreas_gallbladder, melanoma,head_and_neck,cervical,liver_bileduct,breast,renal, prostate,ovary,thyroid,non_cancer,uterine

SEQ ID NO: 471780 - DNA, 194 bp, Homo sapiens; identical to SEQ ID NO: 367231
  chr17:37074886-37075080
  hypo
  myeloid_neoplasm vs. melanoma

SEQ ID NO: 471781 - DNA, 191 bp, Homo sapiens; identical to SEQ ID NO: 355636
  chr17:39788236-39788427
  hypo
  myeloid_neoplasm vs. upper_gi,colorectal,melanoma,renal, liver_bileduct,lung,pancreas_gallbladder,head_and_neck,prostate, multiple_myeloma

SEQ ID NO: 471782 - DNA, 199 bp, Homo sapiens; identical to SEQ ID NO: 367249
  chr17:40436563-40436762
  hypo
  myeloid_neoplasm vs. upper_gi

SEQ ID NO: 471783 - DNA, 343 bp, Homo sapiens; identical to SEQ ID NO: 355641
  chr17:42254319-42254662
  hypo
  myeloid_neoplasm vs. pancreas_gallbladder,melanoma

SEQ ID NO: 471784 - DNA, 425 bp, Homo sapiens; identical to SEQ ID NO: 348809
  chr17:43246865-43247290
  hypo
  myeloid_neoplasm vs. sarcoma,bladder_and_urothelial, anorectal,melanoma,renal,breast,prostate,lymphoid_neoplasm, cervical,head_and_neck,non_cancer,uterine,liver_bileduct,lung, pancreas_gallbladder,colorectal,thyroid,upper_gi

SEQ ID NO: 471785 - DNA, 879 bp, Homo sapiens; identical to SEQ ID NO: 351953
  chr17:43324795-43325674
  hypo
  myeloid_neoplasm vs. head_and_neck,lung,liver_bileduct, upper_gi,colorectal,multiple_myeloma,pancreas_gallbladder, breast,bladder_and_urothelial,uterine,lymphoid_neoplasm, non_cancer,cervical,ovary,thyroid

SEQ ID NO: 471786 - DNA, 147 bp, Homo sapiens
  chr17:48687012-48687159
  hypo
  myeloid_neoplasm vs. sarcoma
cggtgcctccctgccccgtgaccctgaccagctagccacattgcttgtcttcctcaagtgccctgtgcccccagcttcgggctggacattcagagccagccacccaatgggctcagcgcaccccacccataggcagagtgaggtggg

SEQ ID NO: 471787 - DNA, 78 bp, Homo sapiens; identical to SEQ ID NO: 355664
  chr17:48687246-48687324
  hypo
  myeloid_neoplasm vs. sarcoma

SEQ ID NO: 471788 - DNA, 218 bp, Homo sapiens; identical to SEQ ID NO: 367298
  chr17:60744620-60744838
  hypo
  myeloid_neoplasm vs. thyroid

SEQ ID NO: 471789 - DNA, 272 bp, Homo sapiens; identical to SEQ ID NO: 367316
  chr17:65040729-65041001
  hypo

SEQ ID NO: 471790 - DNA, 184 bp, Homo sapiens; identical to SEQ ID NO: 456633
  chr17:72367880-72368064
  hypo
  myeloid_neoplasm vs. thyroid

SEQ ID NO: 471791 - DNA, 345 bp, Homo sapiens; identical to SEQ ID NO: 355694
  chr17:72368130-72368475
  hypo
  myeloid_neoplasm vs. thyroid

SEQ ID NO: 471792 - DNA, 230 bp, Homo sapiens; identical to SEQ ID NO: 367336
  chr17:72875508-72875738
  hypo
  myeloid_neoplasm vs. head_and_neck,renal, bladder_and_urothelial,upper_gi,liver_bileduct, lymphoid_neoplasm,pancreas_gallbladder

SEQ ID NO: 471793 - DNA, 88 bp, Homo sapiens; identical to SEQ ID NO: 343115
  chr17:73910336-73910424
  hypo
  myeloid_neoplasm vs. melanoma

SEQ ID NO: 471794 - DNA, 22 bp, Homo sapiens
  chr17:73913897-73913919
  hypo
  myeloid_neoplasm vs. sarcoma,thyroid, bladder_and_urothelial,prostate,uterine
tcccgctgctgctggcccagcc

SEQ ID NO: 471795 - DNA, 349 bp, Homo sapiens; identical to SEQ ID NO: 343116
  chr17:74003316-74003665
  hypo
  myeloid_neoplasm vs. bladder_and_urothelial

SEQ ID NO: 471796 - DNA, 506 bp, Homo sapiens; identical to SEQ ID NO: 343117
  chr17:74003908-74004414
  hypo
  myeloid_neoplasm vs. head_and_neck, bladder_and_urothelial,breast,ovary,prostate,renal,colorectal, pancreas_gallbladder

SEQ ID NO: 471797 - DNA, 270 bp, Homo sapiens
  chr17:74005186-74005456
  hypo
  myeloid_neoplasm vs. head_and_neck, bladder_and_urothelial,thyroid,cervical,prostate,colorectal, ovary,renal
cgggcttcctcctctccagcagcaggcgcttgctctgcagctcgtacaccgcgtcctccgcggcccgcctcttctgggccgcctcccgcacctcctggcggagccgctctgcttctttctccagcaccgggtccttctcgtggcgcaccacctccttgctcaccgtcttggtctccaccttggcccgctcgcgcctccactcgtcgcgctcaccctgcaggcggatgagctgctcctgggagcgcccgtggctgttgacgagctcgttga

SEQ ID NO: 471798 - DNA, 154 bp, Homo sapiens; identical to SEQ ID NO: 355712
  chr17:74005497-74005651
  hypo
  myeloid_neoplasm vs. head_and_neck, bladder_and_urothelial,thyroid,cervical,prostate,colorectal, ovary,renal

SEQ ID NO: 471799 - DNA, 48 bp, Homo sapiens; identical to SEQ ID NO: 343133
  chr17:74475354-74475402
  hypo
  myeloid_neoplasm vs. melanoma,pancreas_gallbladder, breast,renal

SEQ ID NO: 471800 - DNA, 56 bp, Homo sapiens
  chr17:75411761-75411817
  hypo
  myeloid_neoplasm vs. melanoma
cggcaccgaagccgagggaaggcagcattagtatgagctcccagcccaccgggctc

SEQ ID NO: 471801 - DNA, 96 bp, Homo sapiens; identical to SEQ ID NO: 381796
  chr17:75411846-75411942
  hypo
  myeloid_neoplasm vs. melanoma

SEQ ID NO: 471802 - DNA, 170 bp, Homo sapiens; identical to SEQ ID NO: 352027
  chr17:76337740-76337910
  hypo
  myeloid_neoplasm vs. multiple_myeloma,colorectal, pancreas_gallbladder,upper_gi

SEQ ID NO: 471803 - DNA, 187 bp, Homo sapiens; identical to SEQ ID NO: 343158
  chr17:76482434-76482621
  hypo
  myeloid_neoplasm vs. lymphoid_neoplasm

SEQ ID NO: 471804 - DNA, 184 bp, Homo sapiens; identical to SEQ ID NO: 348849
  chr17:77769064-77769248
  hypo
  myeloid_neoplasm vs. melanoma,renal,head_and_neck, liver_bileduct,lung,breast,uterine,prostate,upper_gi

SEQ ID NO: 471805 - DNA, 5 bp, Homo sapiens
  chr17:77899525-77899530
  hypo
  myeloid_neoplasm vs. bladder_and_urothelial, lymphoid_neoplasm,uterine,sarcoma,anorectal,thyroid,renal, prostate,non_cancer,breast,cervical,lung,upper_gi,melanoma, head_and_neck,pancreas_gallbladder,liver_bileduct,ovary,
  CONT. FROM ABOVE: colorectal
cgggg

SEQ ID NO: 471806 - DNA, 106 bp, Homo sapiens
  chr17:77899559-77899665
  hypo
  myeloid_neoplasm vs. bladder_and_urothelial, lymphoid_neoplasm,uterine,sarcoma,anorectal,thyroid,renal, prostate,non_cancer,breast,cervical,lung,upper_gi,melanoma, head_and_neck,pancreas_gallbladder,liver_bileduct,ovary,
  CONT. FROM ABOVE: colorectal
cctgtcccagctctggtcccccggccccaggtcctggacgctggctccgcgcagcagcaggcggcctccggaggacacgatgtgactggctgccgctacgtcgcac

SEQ ID NO: 471807 - DNA, 190 bp, Homo sapiens; identical to SEQ ID NO: 381833
  chr17:77917679-77917869
  hypo
  myeloid_neoplasm vs. liver_bileduct

SEQ ID NO: 471808 - DNA, 152 bp, Homo sapiens
  chr17:77923970-77924122
  hypo
cggtatccccccaaaccctcgagggaggtgttgtgttttgtttttttttttcaacgcagcagctttgattgctttatcggtgtgttcacagagagcctcacacaagaaaacggggccctcacgaggaggtggcccgtgggtgcgggcgggcg

SEQ ID NO: 471809 - DNA, 26 bp, Homo sapiens
  chr17:78587649-78587675
  hypo
  myeloid_neoplasm vs. liver_bileduct
cgggctgggccgcgtgttctggataa

SEQ ID NO: 471810 - DNA, 162 bp, Homo sapiens; identical to SEQ ID NO: 343198
  chr17:78590602-78590764
  hypo
  myeloid_neoplasm vs. melanoma

SEQ ID NO: 471811 - DNA, 310 bp, Homo sapiens; identical to SEQ ID NO: 343199
  chr17:78598720-78599030
  hypo
  myeloid_neoplasm vs. sarcoma,cervical

SEQ ID NO: 471812 - DNA, 194 bp, Homo sapiens; identical to SEQ ID NO: 343202
  chr17:78649377-78649571
  hypo
  myeloid_neoplasm vs. thyroid,anorectal

SEQ ID NO: 471813 - DNA, 60 bp, Homo sapiens; identical to SEQ ID NO: 343216
  chr17:79060187-79060247
  hypo
  myeloid_neoplasm vs. lung,breast,ovary, pancreas_gallbladder,sarcoma,liver_bileduct

SEQ ID NO: 471814 - DNA, 196 bp, Homo sapiens; identical to SEQ ID NO: 343217
  chr17:79060680-79060876
  hypo
  myeloid_neoplasm vs. melanoma

SEQ ID NO: 471815 - DNA, 257 bp, Homo sapiens; identical to SEQ ID NO: 343219
  chr17:79074754-79075011
  hypo
  myeloid_neoplasm vs. uterine,sarcoma,melanoma

SEQ ID NO: 471816 - DNA, 169 bp, Homo sapiens; identical to SEQ ID NO: 343229
  chr17:79253772-79253941
  hypo
  myeloid_neoplasm vs. renal,pancreas_gallbladder,lung, breast

SEQ ID NO: 471817 - DNA, 67 bp, Homo sapiens; identical to SEQ ID NO: 471097
  chr17:80277699-80277766
  hypo
  myeloid_neoplasm vs. colorectal,cervical,renal

SEQ ID NO: 471818 - DNA, 68 bp, Homo sapiens
  chr17:80332182-80332250
  hypo
cgtcgtgaggggtcagagatggcgctgacccccgagtccccgagcagcttccctgggctggccgccac

SEQ ID NO: 471819 - DNA, 404 bp, Homo sapiens; identical to SEQ ID NO: 361176
  chr17:80332292-80332696
  hypo

SEQ ID NO: 471820 - DNA, 230 bp, Homo sapiens; identical to SEQ ID NO: 456651
  chr17:80394871-80395101
  hypo
  myeloid_neoplasm vs. thyroid,cervical

SEQ ID NO: 471821 - DNA, 82 bp, Homo sapiens; identical to SEQ ID NO: 355773
  chr17:80395146-80395228
  hypo
  myeloid_neoplasm vs. thyroid,cervical

SEQ ID NO: 471822 - DNA, 244 bp, Homo sapiens; identical to SEQ ID NO: 461669
  chr17:80571137-80571381
  hypo
  myeloid_neoplasm vs. upper_gi,sarcoma,liver_bileduct, cervical,head_and_neck,colorectal,breast,anorectal,uterine, pancreas_gallbladder,lung,prostate

SEQ ID NO: 471823 - DNA, 271 bp, Homo sapiens; identical to SEQ ID NO: 355778
  chr17:80571776-80572047
  hypo
  myeloid_neoplasm vs. upper_gi,sarcoma,liver_bileduct, cervical,head_and_neck,colorectal,breast,anorectal,uterine, pancreas_gallbladder,lung,prostate

SEQ ID NO: 471824 - DNA, 139 bp, Homo sapiens; identical to SEQ ID NO: 343273
  chr17:80763321-80763460
  hypo
  myeloid_neoplasm vs. sarcoma,renal,thyroid, liver_bileduct,head_and_neck,anorectal

SEQ ID NO: 471825 - DNA, 269 bp, Homo sapiens; identical to SEQ ID NO: 348861
  chr17:80965953-80966222
  hypo
  myeloid_neoplasm vs. melanoma,upper_gi,prostate,renal, colorectal,breast,bladder_and_urothelial,lymphoid_neoplasm, head_and_neck,sarcoma,lung

SEQ ID NO: 471826 - DNA, 328 bp, Homo sapiens; identical to SEQ ID NO: 381941
  chr17:80995234-80995562
  hypo
  myeloid_neoplasm vs. anorectal

SEQ ID NO: 471827 - DNA, 64 bp, Homo sapiens
  chr17:81049931-81049995
  hypo
  myeloid_neoplasm vs. sarcoma,renal
cgcagggttcaggggcttcagagggggttctgtgagcagggcttggcttgaaagccatttgggg

SEQ ID NO: 471828 - DNA, 188 bp, Homo sapiens; identical to SEQ ID NO: 323753
  chr17:81062393-81062581
  hypo
  myeloid_neoplasm vs. melanoma

SEQ ID NO: 471829 - DNA, 120 bp, Homo sapiens; identical to SEQ ID NO: 343299
  chr18:3051295-3051415
  hypo
  myeloid_neoplasm vs. anorectal,sarcoma,prostate

SEQ ID NO: 471830 - DNA, 257 bp, Homo sapiens; identical to SEQ ID NO: 343334
  chr18:10485485-10485742
  hypo
  myeloid_neoplasm vs. prostate,bladder_and_urothelial, breast,sarcoma,head_and_neck,ovary

SEQ ID NO: 471831 - DNA, 423 bp, Homo sapiens; identical to SEQ ID NO: 343345
  chr18:12433995-12434418
  hypo
  myeloid_neoplasm vs. melanoma

SEQ ID NO: 471832 - DNA, 56 bp, Homo sapiens; identical to SEQ ID NO: 343356
  chr18:13499663-13499719
  hypo
  myeloid_neoplasm vs. sarcoma,melanoma,breast,thyroid, colorectal,lymphoid_neoplasm,non_cancer,renal,ovary, pancreas_gallbladder,prostate,anorectal

SEQ ID NO: 471833 - DNA, 52 bp, Homo sapiens; identical to SEQ ID NO: 456662
  chr18:13826252-13826304
  hypo
  myeloid_neoplasm vs. melanoma,anorectal,non_cancer, thyroid,sarcoma

SEQ ID NO: 471834 - DNA, 79 bp, Homo sapiens; identical to SEQ ID NO: 355828
  chr18:13826592-13826671
  hypo
  myeloid_neoplasm vs. melanoma,anorectal,non_cancer, thyroid,sarcoma

SEQ ID NO: 471835 - DNA, 105 bp, Homo sapiens; identical to SEQ ID NO: 343377
  chr18:44260345-44260450
  hypo
  myeloid_neoplasm vs. head_and_neck,lung

SEQ ID NO: 471836 - DNA, 249 bp, Homo sapiens; identical to SEQ ID NO: 343395
  chr18:54694241-54694490
  hypo
  myeloid_neoplasm vs. lymphoid_neoplasm

SEQ ID NO: 471837 - DNA, 172 bp, Homo sapiens; identical to SEQ ID NO: 355853
  chr18:56008826-56008998
  hypo
  myeloid_neoplasm vs. melanoma

SEQ ID NO: 471838 - DNA, 486 bp, Homo sapiens; identical to SEQ ID NO: 355854
  chr18:59483218-59483704
  hypo
  myeloid_neoplasm vs. head_and_neck,anorectal,breast, bladder_and_urothelial,prostate,non_cancer,uterine,cervical, ovary,colorectal,lymphoid_neoplasm,pancreas_gallbladder

SEQ ID NO: 471839 - DNA, 44 bp, Homo sapiens; identical to SEQ ID NO: 471102
  chr18:63417693-63417737
  hypo
  myeloid_neoplasm vs. liver_bileduct

SEQ ID NO: 471840 - DNA, 153 bp, Homo sapiens; identical to SEQ ID NO: 343418
  chr18:74069268-74069421
  hypo
  myeloid_neoplasm vs. liver_bileduct,melanoma

SEQ ID NO: 471841 - DNA, 684 bp, Homo sapiens; identical to SEQ ID NO: 343420
  chr18:74083302-74083986
  hypo
  myeloid_neoplasm vs. uterine,liver_bileduct,thyroid, anorectal

SEQ ID NO: 471842 - DNA, 935 bp, Homo sapiens; identical to SEQ ID NO: 470297
  chr18:74091392-74092327
  hypo
  myeloid_neoplasm vs. melanoma

SEQ ID NO: 471843 - DNA, 367 bp, Homo sapiens; identical to SEQ ID NO: 470305
  chr18:74171117-74171484
  hypo
  myeloid_neoplasm vs. bladder_and_urothelial, liver_bileduct,melanoma

SEQ ID NO: 471844 - DNA, 122 bp, Homo sapiens; identical to SEQ ID NO: 355868
  chr18:74171505-74171627
  hypo
  myeloid_neoplasm vs. bladder_and_urothelial, liver_bileduct,melanoma

SEQ ID NO: 471845 - DNA, 183 bp, Homo sapiens
  chr18:74195379-74195562
  hypo
  myeloid_neoplasm vs. sarcoma
cgcctccctgcccactcctgtgggaagctccctctcggcatctgtccgtcatcagcatctgtccgtcatcggcatctgtctgtcacgggtcatctgccgcaccacactgagaacccatgagtgccaaatgtcccccgtcagctggcccacccgcatttcatcttcctggcttaagaaggtgag

SEQ ID NO: 471846 - DNA, 14 bp, Homo sapiens
  chr18:74195591-74195605
  hypo
  myeloid_neoplasm vs. sarcoma
acctggtcttctcc

SEQ ID NO: 471847 - DNA, 246 bp, Homo sapiens; identical to SEQ ID NO: 470311
  chr18:74325503-74325749
  hypo
  myeloid_neoplasm vs. renal,colorectal, pancreas_gallbladder,head_and_neck,bladder_and_urothelial, non_cancer,thyroid,prostate,cervical,lymphoid_neoplasm,lung

SEQ ID NO: 471848 - DNA, 173 bp, Homo sapiens; identical to SEQ ID NO: 355871
  chr18:74325938-74326111
  hypo
  myeloid_neoplasm vs. renal,colorectal, pancreas_gallbladder,head_and_neck,bladder_and_urothelial, non_cancer,thyroid,prostate,cervical,lymphoid_neoplasm,lung

SEQ ID NO: 471849 - DNA, 430 bp, Homo sapiens; identical to SEQ ID NO: 343446
  chr18:74696524-74696954
  hypo
  myeloid_neoplasm vs. ovary,pancreas_gallbladder, colorectal

SEQ ID NO: 471850 - DNA, 144 bp, Homo sapiens; identical to SEQ ID NO: 463480
  chr18:76129277-76129421
  hypo
  myeloid_neoplasm vs. sarcoma

SEQ ID NO: 471851 - DNA, 180 bp, Homo sapiens; identical to SEQ ID NO: 355881
  chr18:76129450-76129630
  hypo
  myeloid_neoplasm vs. sarcoma

SEQ ID NO: 471852 - DNA, 464 bp, Homo sapiens; identical to SEQ ID NO: 463485
  chr18:76435960-76436424
  hypo
  myeloid_neoplasm vs. lymphoid_neoplasm,anorectal

SEQ ID NO: 471853 - DNA, 29 bp, Homo sapiens
  chr18:76436455-76436484
  hypo
  myeloid_neoplasm vs. lymphoid_neoplasm,anorectal
ggagcagattctgatcccaccgcaatgcc

SEQ ID NO: 471854 - DNA, 178 bp, Homo sapiens; identical to SEQ ID NO: 343473
  chr18:76552775-76552953
  hypo
  myeloid_neoplasm vs. thyroid,lymphoid_neoplasm, non_cancer,anorectal,prostate,uterine,colorectal

SEQ ID NO: 471855 - DNA, 232 bp, Homo sapiens; identical to SEQ ID NO: 343479
  chr18:77083049-77083281
  hypo
  myeloid_neoplasm vs. melanoma,pancreas_gallbladder

SEQ ID NO: 471856 - DNA, 150 bp, Homo sapiens
  chr18:77270851-77271001
  hypo
  myeloid_neoplasm vs. lymphoid_neoplasm
cggggcatcctctgccggggcatcttccgccggggcatcctccgccgggacatcctccaccgggggctcctccgccggggcatcctgctccggggcatcgttcgccggtcttgtcgctgcggtggaagtgtcgtgttcccagccaggctg

SEQ ID NO: 471857 - DNA, 338 bp, Homo sapiens; identical to SEQ ID NO: 367670
  chr18:77271089-77271427
  hypo
  myeloid_neoplasm vs. lymphoid_neoplasm

SEQ ID NO: 471858 - DNA, 51 bp, Homo sapiens; identical to SEQ ID NO: 382152
  chr18:77456042-77456093
  hypo
  myeloid_neoplasm vs. sarcoma

SEQ ID NO: 471859 - DNA, 31 bp, Homo sapiens; identical to SEQ ID NO: 367676
  chr18:77482822-77482853
  hypo
  myeloid_neoplasm vs. renal,breast,colorectal,ovary

SEQ ID NO: 471860 - DNA, 315 bp, Homo sapiens; identical to SEQ ID NO: 465330
  chr18:77509030-77509345
  hypo
  myeloid_neoplasm vs. melanoma

SEQ ID NO: 471861 - DNA, 116 bp, Homo sapiens; identical to SEQ ID NO: 346189
  chr18:77509679-77509795
  hypo
  myeloid_neoplasm vs. melanoma

SEQ ID NO: 471862 - DNA, 576 bp, Homo sapiens; identical to SEQ ID NO: 343503
  chr18:77608097-77608673
  hypo
  myeloid_neoplasm vs. thyroid,colorectal, lymphoid_neoplasm,non_cancer,pancreas_gallbladder

SEQ ID NO: 471863 - DNA, 235 bp, Homo sapiens; identical to SEQ ID NO: 343508
  chr18:77642685-77642920
  hypo
  myeloid_neoplasm vs. cervical

SEQ ID NO: 471864 - DNA, 145 bp, Homo sapiens; identical to SEQ ID NO: 461697
  chr18:77644520-77644665
  hypo
  myeloid_neoplasm vs. liver_bileduct,colorectal

SEQ ID NO: 471865 - DNA, 39 bp, Homo sapiens; identical to SEQ ID NO: 367695
  chr18:77644881-77644920
  hypo
  myeloid_neoplasm vs. liver_bileduct,colorectal

SEQ ID NO: 471866 - DNA, 278 bp, Homo sapiens; identical to SEQ ID NO: 461699
  chr18:77808879-77809157
  hypo
  myeloid_neoplasm vs. bladder_and_urothelial,sarcoma, prostate

SEQ ID NO: 471867 - DNA, 368 bp, Homo sapiens; identical to SEQ ID NO: 355907
  chr18:77809186-77809554
  hypo
  myeloid_neoplasm vs. bladder_and_urothelial,sarcoma, prostate

SEQ ID NO: 471868 - DNA, 912 bp, Homo sapiens; identical to SEQ ID NO: 343511
  chr18:77943609-77944521
  hypo
  myeloid_neoplasm vs. bladder_and_urothelial,melanoma, anorectal,lung

SEQ ID NO: 471869 - DNA, 200 bp, Homo sapiens; identical to SEQ ID NO: 343522
  chr19:601344-601544
  hypo
  myeloid_neoplasm vs. renal,cervical,breast

SEQ ID NO: 471870 - DNA, 35 bp, Homo sapiens
  chr19:638348-638383
  hypo
  myeloid_neoplasm vs. lymphoid_neoplasm, bladder_and_urothelial,sarcoma,melanoma,breast,lung,prostate, colorectal,pancreas_gallbladder,non_cancer,uterine,thyroid, anorectal,upper_gi
cgaggtgtcattaaagaaactcagacgcctggggt

SEQ ID NO: 471871 - DNA, 112 bp, Homo sapiens; identical to SEQ ID NO: 355918
  chr19:638476-638588
  hypo
  myeloid_neoplasm vs. lymphoid_neoplasm, bladder_and_urothelial,sarcoma,melanoma,breast,lung,prostate, colorectal,pancreas_gallbladder,non_cancer,uterine,thyroid, anorectal,upper_gi

SEQ ID NO: 471872 - DNA, 182 bp, Homo sapiens; identical to SEQ ID NO: 343529
  chr19:739235-739417
  hypo
  myeloid_neoplasm vs. sarcoma

SEQ ID NO: 471873 - DNA, 279 bp, Homo sapiens; identical to SEQ ID NO: 218770
  chr19:1005441-1005720
  hypo
  myeloid_neoplasm vs. renal

SEQ ID NO: 471874 - DNA, 6 bp, Homo sapiens
  chr19:1357664-1357670
  hypo
  myeloid_neoplasm vs. liver_bileduct
cgacgc

SEQ ID NO: 471875 - DNA, 55 bp, Homo sapiens; identical to SEQ ID NO: 382244
  chr19:1482826-1482881
  hypo
  myeloid_neoplasm vs. prostate

SEQ ID NO: 471876 - DNA, 59 bp, Homo sapiens; identical to SEQ ID NO: 465348
  chr19:1496674-1496733
  hypo
  myeloid_neoplasm vs. ovary,upper_gi, bladder_and_urothelial,lymphoid_neoplasm,head_and_neck,prostate, breast,pancreas_gallbladder,lung

SEQ ID NO: 471877 - DNA, 12 bp, Homo sapiens
  chr19:1496884-1496896
  hypo
  myeloid_neoplasm vs. ovary,upper_gi, bladder_and_urothelial,lymphoid_neoplasm,head_and_neck,prostate, breast,pancreas_gallbladder,lung
gtgtgtgcccac

SEQ ID NO: 471878 - DNA, 228 bp, Homo sapiens; identical to SEQ ID NO: 465350
  chr19:1577427-1577655
  hypo
  myeloid_neoplasm vs. melanoma,bladder_and_urothelial

SEQ ID NO: 471879 - DNA, 548 bp, Homo sapiens; identical to SEQ ID NO: 465351
  chr19:1577687-1578235
  hypo
  myeloid_neoplasm vs. melanoma,bladder_and_urothelial

SEQ ID NO: 471880 - DNA, 155 bp, Homo sapiens; identical to SEQ ID NO: 367787
  chr19:2339592-2339747
  hypo
  myeloid_neoplasm vs. bladder_and_urothelial,breast, cervical,uterine

SEQ ID NO: 471881 - DNA, 301 bp, Homo sapiens; identical to SEQ ID NO: 343604
  chr19:2413723-2414024
  hypo
  myeloid_neoplasm vs. lymphoid_neoplasm,cervical, non_cancer,thyroid,anorectal

SEQ ID NO: 471882 - DNA, 247 bp, Homo sapiens
  chr19:3114752-3114999
  hypo
  myeloid_neoplasm vs. upper_gi,lung
cgtatcccgaccccagggtctccattggcccgagccctccgggctgcttcagacactgccgtaggtggcgcagtgcgcggtccaccccctcctggtggctttccgtcctcccgctggtttgggtgctgtgtccctgtcctgcccccccacccccggcagccggcctgagcacccaccgctgtgttgcagctacctgaccgacgttgaccgcatcgccaccttgggctacctgcccacccagcaggac

SEQ ID NO: 471883 - DNA, 66 bp, Homo sapiens; identical to SEQ ID NO: 325036
  chr19:3115027-3115093
  hypo
  myeloid_neoplasm vs. upper_gi,lung

SEQ ID NO: 471884 - DNA, 13 bp, Homo sapiens
  chr19:3219527-3219540
  hypo
  myeloid_neoplasm vs. melanoma
cgccgcgccctgc

SEQ ID NO: 471885 - DNA, 72 bp, Homo sapiens; identical to SEQ ID NO: 355964
  chr19:3219654-3219726
  hypo
  myeloid_neoplasm vs. melanoma

SEQ ID NO: 471886 - DNA, 86 bp, Homo sapiens
  chr19:3494538-3494624
  hypo
  myeloid_neoplasm vs. liver_bileduct,multiple_myeloma
cgggcctgccggctggagactccagaatttggggccactggggctacacttaggtgggttcgggtacaggcgcaagtgcaggcgtc

SEQ ID NO: 471887 - DNA, 32 bp, Homo sapiens; identical to SEQ ID NO: 382304
  chr19:3691238-3691270
  hypo
  myeloid_neoplasm vs. liver_bileduct

SEQ ID NO: 471888 - DNA, 97 bp, Homo sapiens; identical to SEQ ID NO: 205124
  chr19:4064872-4064969
  hypo
  myeloid_neoplasm vs. lymphoid_neoplasm,multiple_myeloma, pancreas_gallbladder,lung,liver_bileduct,ovary

SEQ ID NO: 471889 - DNA, 80 bp, Homo sapiens; identical to SEQ ID NO: 343653
  chr19:4697654-4697734
  hypo
  myeloid_neoplasm vs. lung,sarcoma,liver_bileduct, cervical,upper_gi,lymphoid_neoplasm,ovary,pancreas_gallbladder, renal,colorectal

SEQ ID NO: 471890 - DNA, 12 bp, Homo sapiens
  chr19:4816460-4816472
  hypo
cggtgggggggt

SEQ ID NO: 471891 - DNA, 615 bp, Homo sapiens; identical to SEQ ID NO: 355982
  chr19:4816550-4817165
  hypo

SEQ ID NO: 471892 - DNA, 393 bp, Homo sapiens; identical to SEQ ID NO: 367865
  chr19:6007912-6008305
  hypo
  myeloid_neoplasm vs. pancreas_gallbladder

SEQ ID NO: 471893 - DNA, 98 bp, Homo sapiens
  chr19:6664841-6664939
  hypo
  myeloid_neoplasm vs. lung,liver_bileduct
cgcccagcctctgcttcgtgagttttctttcccctgaggcaccctctgagttctccacgtgtcagacccatgtccaatgcaccacgctccttccttca

SEQ ID NO: 471894 - DNA, 186 bp, Homo sapiens; identical to SEQ ID NO: 367877
  chr19:6664968-6665154
  hypo
  myeloid_neoplasm vs. lung,liver_bileduct

SEQ ID NO: 471895 - DNA, 758 bp, Homo sapiens; identical to SEQ ID NO: 471112
  chr19:7459644-7460402
  hypo
  myeloid_neoplasm vs. lung,liver_bileduct,upper_gi, pancreas_gallbladder,colorectal,prostate,ovary,sarcoma, multiple_myeloma,breast,lymphoid_neoplasm

SEQ ID NO: 471896 - DNA, 766 bp, Homo sapiens; identical to SEQ ID NO: 345562
  chr19:7459915-7460681
  hypo
  myeloid_neoplasm vs. lung,liver_bileduct, pancreas_gallbladder,upper_gi,breast,ovary,sarcoma,prostate, colorectal,lymphoid_neoplasm,head_and_neck,multiple_myeloma, uterine,anorectal,bladder_and_urothelial,thyroid,non_cancer,
  CONT. FROM ABOVE: cervical,renal,melanoma

SEQ ID NO: 471897 - DNA, 685 bp, Homo sapiens; identical to SEQ ID NO: 335930
  chr19:8274278-8274963
  hypo
  myeloid_neoplasm vs. lymphoid_neoplasm,thyroid,prostate, non_cancer,cervical

SEQ ID NO: 471898 - DNA, 61 bp, Homo sapiens; identical to SEQ ID NO: 461750
  chr19:10370250-10370311
  hypo
  myeloid_neoplasm vs. sarcoma

SEQ ID NO: 471899 - DNA, 88 bp, Homo sapiens; identical to SEQ ID NO: 348939
  chr19:10370575-10370663
  hypo
  myeloid_neoplasm vs. sarcoma

SEQ ID NO: 471900 - DNA, 508 bp, Homo sapiens; identical to SEQ ID NO: 335951
  chr19:11144009-11144517
  hypo
  myeloid_neoplasm vs. lung,colorectal

SEQ ID NO: 471901 - DNA, 177 bp, Homo sapiens; identical to SEQ ID NO: 335952
  chr19:11199850-11200027
  hypo
  myeloid_neoplasm vs. liver_bileduct,breast

SEQ ID NO: 471902 - DNA, 55 bp, Homo sapiens; identical to SEQ ID NO: 343772
  chr19:12749512-12749567
  hypo
  myeloid_neoplasm vs. liver_bileduct,lung

SEQ ID NO: 471903 - DNA, 152 bp, Homo sapiens; identical to SEQ ID NO: 456725
  chr19:14181154-14181306
  hypo
  myeloid_neoplasm vs. melanoma,upper_gi,thyroid, colorectal,uterine

SEQ ID NO: 471904 - DNA, 179 bp, Homo sapiens; identical to SEQ ID NO: 356051
  chr19:14181846-14182025
  hypo
  myeloid_neoplasm vs. melanoma,upper_gi,thyroid, colorectal,uterine

SEQ ID NO: 471905 - DNA, 366 bp, Homo sapiens; identical to SEQ ID NO: 343807
  chr19:15302345-15302711
  hypo
  myeloid_neoplasm vs. ovary,breast,anorectal

SEQ ID NO: 471906 - DNA, 247 bp, Homo sapiens; identical to SEQ ID NO: 456743
  chr19:17264714-17264961
  hypo
  myeloid_neoplasm vs. sarcoma,bladder_and_urothelial

SEQ ID NO: 471907 - DNA, 1 bp, Homo sapiens
  chr19:18054252-18054253
  hypo
  myeloid_neoplasm vs. pancreas_gallbladder, multiple_myeloma
c

SEQ ID NO: 471908 - DNA, 10 bp, Homo sapiens
  chr19:18055035-18055045
  hypo
  myeloid_neoplasm vs. pancreas_gallbladder, multiple_myeloma
aggtggaggc

SEQ ID NO: 471909 - DNA, 354 bp, Homo sapiens; identical to SEQ ID NO: 454288
  chr19:18117804-18118158
  hypo
  myeloid_neoplasm vs. melanoma,prostate,breast, multiple_myeloma,renal,sarcoma,non_cancer,uterine,ovary

SEQ ID NO: 471910 - DNA, 101 bp, Homo sapiens; identical to SEQ ID NO: 343845
  chr19:18255890-18255991
  hypo
  myeloid_neoplasm vs. pancreas_gallbladder,upper_gi, bladder_and_urothelial

SEQ ID NO: 471911 - DNA, 612 bp, Homo sapiens; identical to SEQ ID NO: 343847
  chr19:18368482-18369094
  hypo
  myeloid_neoplasm vs. renal,lymphoid_neoplasm,prostate, uterine,bladder_and_urothelial

SEQ ID NO: 471912 - DNA, 4 bp, Homo sapiens
  chr19:18879355-18879359
  hypo
  myeloid_neoplasm vs. ovary
cggg

SEQ ID NO: 471913 - DNA, 312 bp, Homo sapiens; identical to SEQ ID NO: 368015
  chr19:18879409-18879721
  hypo
  myeloid_neoplasm vs. ovary

SEQ ID NO: 471914 - DNA, 197 bp, Homo sapiens
  chr19:18988706-18988903
  hypo
  myeloid_neoplasm vs. melanoma
cgagccaaaagtcttgagtcgtctttgattcttttatttctgtttcatctacacccaaggcgaatctgatgggttctcccttccaaacagggtggggggtctgacgctcctctgcctggctacagccccggatgtgttaaatgtctgcatctcgcacctcccgttccaaaaaacgtcacggagctctgagccactgc

SEQ ID NO: 471915 - DNA, 322 bp, Homo sapiens; identical to SEQ ID NO: 456750
  chr19:19391586-19391908
  hypo
  myeloid_neoplasm vs. upper_gi

SEQ ID NO: 471916 - DNA, 19 bp, Homo sapiens
  chr19:19447926-19447945
  hypo
  myeloid_neoplasm vs. colorectal,upper_gi
cgccttgtttttttttttt

SEQ ID NO: 471917 - DNA, 76 bp, Homo sapiens; identical to SEQ ID NO: 368020
  chr19:19448030-19448106
  hypo
  myeloid_neoplasm vs. colorectal,upper_gi

SEQ ID NO: 471918 - DNA, 106 bp, Homo sapiens; identical to SEQ ID NO: 343871
  chr19:19680307-19680413
  hypo
  myeloid_neoplasm vs. colorectal,upper_gi, bladder_and_urothelial,ovary

SEQ ID NO: 471919 - DNA, 173 bp, Homo sapiens
  chr19:19737446-19737619
  hypo
  myeloid_neoplasm vs. bladder_and_urothelial,ovary
cgcacgtagaagaaaatgcgggtgtacacagccaccatgagcaggaagacaagcaggctcgacagagcccagacggccaaataggagcggctgagcaggggtgccatgcgtgagcagcggtccagggcacagaggcagtgccaggagtgggcaggcagcagccccaggcccag

SEQ ID NO: 471920 - DNA, 178 bp, Homo sapiens; identical to SEQ ID NO: 219336
  chr19:19737702-19737880
  hypo
  myeloid_neoplasm vs. bladder_and_urothelial,ovary

SEQ ID NO: 471921 - DNA, 101 bp, Homo sapiens; identical to SEQ ID NO: 343882
  chr19:28296843-28296944
  hypo
  myeloid_neoplasm vs. anorectal

SEQ ID NO: 471922 - DNA, 389 bp, Homo sapiens
  chr19:28341898-28342287
  hypo
  myeloid_neoplasm vs. thyroid,anorectal,prostate
cggcctgctggccgctcctctgtcaggtctccgggtcaactagatgtcggccacgaacgccagacttagcctccggctcgccatgtttgaggtcgaccagcaggccctctcaccggagtgagctgtaaggagggatgctcagtgaaccaatcaagacgtgggccacggaggtcagcagggctctgggcaattcatggtcctgacctggcaagcaccactctgggacctgagcgttgcaaacccatctacacccgtccaacctgtgttggccggcgctcctcgctcgctcaggcctccgggttgacaagagttcagccgtgagcgcctggtttagccgccagcttacagtgtcggaggtcaaacagcaagccctcccccggagtaagcag

SEQ ID NO: 471923 - DNA, 259 bp, Homo sapiens; identical to SEQ ID NO: 336066
  chr19:30165123-30165382
  hypo
  myeloid_neoplasm vs. anorectal,lung,ovary,breast, lymphoid_neoplasm,renal,uterine,melanoma,pancreas_gallbladder, upper_gi,prostate,non_cancer,head_and_neck,colorectal,cervical, liver_bileduct,bladder_and_urothelial

SEQ ID NO: 471924 - DNA, 412 bp, Homo sapiens; identical to SEQ ID NO: 463536
  chr19:31767664-31768076
  hypo
  myeloid_neoplasm vs. lymphoid_neoplasm

SEQ ID NO: 471925 - DNA, 320 bp, Homo sapiens; identical to SEQ ID NO: 463537
  chr19:31768105-31768425
  hypo
  myeloid_neoplasm vs. lymphoid_neoplasm

SEQ ID NO: 471926 - DNA, 59 bp, Homo sapiens; identical to SEQ ID NO: 463538
  chr19:31768017-31768076
  hypo
  myeloid_neoplasm vs. lymphoid_neoplasm

SEQ ID NO: 471927 - DNA, 701 bp, Homo sapiens; identical to SEQ ID NO: 356103
  chr19:31768105-31768806
  hypo
  myeloid_neoplasm vs. lymphoid_neoplasm

SEQ ID NO: 471928 - DNA, 247 bp, Homo sapiens; identical to SEQ ID NO: 343913
  chr19:34177611-34177858
  hypo
  myeloid_neoplasm vs. anorectal

SEQ ID NO: 471929 - DNA, 403 bp, Homo sapiens; identical to SEQ ID NO: 368074
  chr19:35617152-35617555
  hypo
  myeloid_neoplasm vs. melanoma

SEQ ID NO: 471930 - DNA, 234 bp, Homo sapiens; identical to SEQ ID NO: 336085
  chr19:35738737-35738971
  hypo
  myeloid_neoplasm vs. lung,upper_gi,ovary,breast, pancreas_gallbladder

SEQ ID NO: 471931 - DNA, 63 bp, Homo sapiens; identical to SEQ ID NO: 471133
  chr19:38976252-38976315
  hypo
  myeloid_neoplasm vs. sarcoma,melanoma,uterine

SEQ ID NO: 471932 - DNA, 37 bp, Homo sapiens; identical to SEQ ID NO: 361586
  chr19:38976790-38976827
  hypo
  myeloid_neoplasm vs. sarcoma,melanoma,uterine

SEQ ID NO: 471933 - DNA, 272 bp, Homo sapiens; identical to SEQ ID NO: 368115
  chr19:39663613-39663885
  hypo
  myeloid_neoplasm vs. upper_gi,colorectal,lung

SEQ ID NO: 471934 - DNA, 473 bp, Homo sapiens; identical to SEQ ID NO: 356144
  chr19:40362772-40363245
  hypo
  myeloid_neoplasm vs. pancreas_gallbladder,head_and_neck, uterine,bladder_and_urothelial,upper_gi,cervical,sarcoma,breast, prostate,non_cancer

SEQ ID NO: 471935 - DNA, 166 bp, Homo sapiens; identical to SEQ ID NO: 343992
  chr19:42813649-42813815
  hypo
  myeloid_neoplasm vs. liver_bileduct

SEQ ID NO: 471936 - DNA, 331 bp, Homo sapiens; identical to SEQ ID NO: 463552
  chr19:44222791-44223122
  hypo
  myeloid_neoplasm vs. melanoma,sarcoma,upper_gi, colorectal,lymphoid_neoplasm,breast,anorectal,thyroid,uterine, pancreas_gallbladder,head_and_neck,non_cancer,prostate,lung, ovary,renal

SEQ ID NO: 471937 - DNA, 345 bp, Homo sapiens; identical to SEQ ID NO: 463553
  chr19:44223175-44223520
  hypo
  myeloid_neoplasm vs. melanoma,sarcoma,upper_gi, colorectal,lymphoid_neoplasm,breast,anorectal,thyroid,uterine, pancreas_gallbladder,head_and_neck,non_cancer,prostate,lung, ovary,renal

SEQ ID NO: 471938 - DNA, 237 bp, Homo sapiens; identical to SEQ ID NO: 356159
  chr19:45567162-45567399
  hypo
  myeloid_neoplasm vs. lymphoid_neoplasm,lung, pancreas_gallbladder,head_and_neck,uterine, bladder_and_urothelial,non_cancer

SEQ ID NO: 471939 - DNA, 40 bp, Homo sapiens; identical to SEQ ID NO: 470371
  chr19:50789768-50789808
  hypo
  myeloid_neoplasm vs. anorectal

SEQ ID NO: 471940 - DNA, 26 bp, Homo sapiens
  chr19:50789973-50789999
  hypo
  myeloid_neoplasm vs. anorectal
gggacacactgggtgaggggagacac

SEQ ID NO: 471941 - DNA, 153 bp, Homo sapiens; identical to SEQ ID NO: 352372
  chr19:50979533-50979686
  hypo
  myeloid_neoplasm vs. pancreas_gallbladder, multiple_myeloma,uterine,prostate,non_cancer,cervical,upper_gi

SEQ ID NO: 471942 - DNA, 88 bp, Homo sapiens
  chr19:51535218-51535306
  hypo
  myeloid_neoplasm vs. cervical
cgctgctggttacgcggacgggcaggcgcagccgcagcagccggaggtcgtgctcgtggctcgtcgaggctcccaggtagccgggatg

SEQ ID NO: 471943 - DNA, 3 bp, Homo sapiens
  chr19:51535410-51535413
  hypo
  myeloid_neoplasm vs. cervical
agc

SEQ ID NO: 471944 - DNA, 143 bp, Homo sapiens; identical to SEQ ID NO: 344098
  chr19:53806012-53806155
  hypo
  myeloid_neoplasm vs. sarcoma

SEQ ID NO: 471945 - DNA, 80 bp, Homo sapiens; identical to SEQ ID NO: 463565
  chr19:54109766-54109846
  hypo
  myeloid_neoplasm vs. uterine,lymphoid_neoplasm,renal

SEQ ID NO: 471946 - DNA, 285 bp, Homo sapiens; identical to SEQ ID NO: 368224
  chr19:54109903-54110188
  hypo
  myeloid_neoplasm vs. uterine,lymphoid_neoplasm,renal

SEQ ID NO: 471947 - DNA, 77 bp, Homo sapiens; identical to SEQ ID NO: 356218
  chr19:56104962-56105039
  hypo
  myeloid_neoplasm vs. melanoma,colorectal,breast,prostate, sarcoma,lung,pancreas_gallbladder,upper_gi,ovary,liver_bileduct, renal,bladder_and_urothelial,cervical,non_cancer

SEQ ID NO: 471948 - DNA, 309 bp, Homo sapiens; identical to SEQ ID NO: 344133
  chr19:58556364-58556673
  hypo
  myeloid_neoplasm vs. anorectal

SEQ ID NO: 471949 - DNA, 91 bp, Homo sapiens; identical to SEQ ID NO: 344141
  chr19:58878569-58878660
  hypo
  myeloid_neoplasm vs. sarcoma,melanoma

SEQ ID NO: 471950 - DNA, 352 bp, Homo sapiens; identical to SEQ ID NO: 337459
  chr2:582796-583148
  hypo
  myeloid_neoplasm vs. anorectal,thyroid

SEQ ID NO: 471951 - DNA, 71 bp, Homo sapiens; identical to SEQ ID NO: 463576
  chr2:875867-875938
  hypo
  myeloid_neoplasm vs. thyroid

SEQ ID NO: 471952 - DNA, 291 bp, Homo sapiens; identical to SEQ ID NO: 337464
  chr2:1482094-1482385
  hypo
  myeloid_neoplasm vs. anorectal

SEQ ID NO: 471953 - DNA, 230 bp, Homo sapiens; identical to SEQ ID NO: 337465
  chr2:1488408-1488638
  hypo
  myeloid_neoplasm vs. anorectal,head_and_neck,cervical, non_cancer,prostate,breast

SEQ ID NO: 471954 - DNA, 91 bp, Homo sapiens; identical to SEQ ID NO: 337466
  chr2:1520228-1520319
  hypo
  myeloid_neoplasm vs. head_and_neck,prostate

SEQ ID NO: 471955 - DNA, 237 bp, Homo sapiens; identical to SEQ ID NO: 337467
  chr2:1543326-1543563
  hypo
  myeloid_neoplasm vs. lymphoid_neoplasm

SEQ ID NO: 471956 - DNA, 123 bp, Homo sapiens
  chr2:1688962-1689085
  hypo
  myeloid_neoplasm vs. anorectal,lymphoid_neoplasm,renal, non_cancer,prostate,breast,uterine,cervical
cggacacctgcagccggagggcccccaaacgcagaccatccctgccccttgccccgggacaggtctgtgctcagcactccgcgcacgaatgggaaacgtgagggaaggaaaaactggagcagg

SEQ ID NO: 471957 - DNA, 86 bp, Homo sapiens; identical to SEQ ID NO: 347868
  chr2:1689123-1689209
  hypo
  myeloid_neoplasm vs. anorectal,lymphoid_neoplasm,renal, non_cancer,prostate,breast,uterine,cervical

SEQ ID NO: 471958 - DNA, 279 bp, Homo sapiens; identical to SEQ ID NO: 337473
  chr2:1771840-1772119
  hypo
  myeloid_neoplasm vs. anorectal,prostate,uterine,renal, breast,non_cancer

SEQ ID NO: 471959 - DNA, 559 bp, Homo sapiens; identical to SEQ ID NO: 337474
  chr2:1846385-1846944
  hypo
  myeloid_neoplasm vs. head_and_neck, bladder_and_urothelial,thyroid,anorectal,prostate,sarcoma, non_cancer,cervical

SEQ ID NO: 471960 - DNA, 618 bp, Homo sapiens
  chr2:2189479-2190097
  hypo
  myeloid_neoplasm vs. thyroid,uterine,cervical
cgagtcccgcgttccttacgtgaggcggacgcagccgggcctcccagacgcccgcgttccttacgtgagggggacgcagccgggccttccgggccttccgggccttcccgagtcccgcgttccttctgtgagggggacgcagccgggcctcccagacgcccgcgttccttacgtgagggggacgcagccgggccttccgggccttcccaagtcccgcgttccttctgtgaggcggacgcagccgggcctcccagacgtccgcgttccttccttgagggggacgcagccaggccttccgggccttcccgagtcccgcgttccttccgtgaggcggacgcagccgggcctcccagacgcccgcgttccttccgtgagggggacgcagccaggccttccgggccttccggagtcccgcgttccttccgtgagggggacgcagccgggcctcccagacgcccgcgttccttacgtgagggggacgcagccaggccttccgggccttcccgagtcccgcgttccttacgtgagggggacgcagccaggccttccgggccttcccgagtcccgcgttcctttcgtgagggggacgtagccgggcctccccgagttccgcggtca

SEQ ID NO: 471961 - DNA, 33 bp, Homo sapiens; identical to SEQ ID NO: 353041
  chr2:2190245-2190278
  hypo
  myeloid_neoplasm vs. thyroid,uterine,cervical

SEQ ID NO: 471962 - DNA, 322 bp, Homo sapiens
  chr2:2575361-2575683
  hypo
  myeloid_neoplasm vs. anorectal,sarcoma,colorectal
cggcagatggcggggccagcacctgagatatcccgttcccctgctatgctggagagggccatggtatgaagtggggggcttcacactgcccccggccctgatctgggaggcccttccaggcgaaggcggctcccggcttccccttcctgctgcccctcttcctccccatgcccgcctctccccccacgcctgcctcctccctcccgctcctcgctgcctcctcgcctccaggccacagtttctgtagctgggtcttcagacttcagaagtgtccttttattgtaaagacttcagtggtttcctagaaagcgccggattttcg

SEQ ID NO: 471963 - DNA, 57 bp, Homo sapiens; identical to SEQ ID NO: 353044
  chr2:2575769-2575826
  hypo
  myeloid_neoplasm vs. anorectal,sarcoma,colorectal

SEQ ID NO: 471964 - DNA, 228 bp, Homo sapiens; identical to SEQ ID NO: 337485
  chr2:2769802-2770030
  hypo
  myeloid_neoplasm vs. thyroid

SEQ ID NO: 471965 - DNA, 163 bp, Homo sapiens; identical to SEQ ID NO: 337490
  chr2:3321063-3321226
  hypo
  myeloid_neoplasm vs. melanoma

SEQ ID NO: 471966 - DNA, 42 bp, Homo sapiens; identical to SEQ ID NO: 337491
  chr2:3349551-3349593
  hypo
  myeloid_neoplasm vs. lymphoid_neoplasm,melanoma,upper_gi, pancreas_gallbladder,renal,anorectal,liver_bileduct,ovary, prostate,uterine,multiple_myeloma,lung,colorectal

SEQ ID NO: 471967 - DNA, 205 bp, Homo sapiens
  chr2:3352473-3352678
  hypo
  myeloid_neoplasm vs. lung,anorectal
cgatgcaggtaccgggcattttccagggaatcaacgactgaaaggagcgaggacctgaggcaacaccaggagctattaacccttcccagccaccactccccaggagagctggagctccagagtgagggatggcggcttccgactgtgcaggaggagaccagactccgttgtcacagaaggcaggggcagggctgcagtccacagc

SEQ ID NO: 471968 - DNA, 293 bp, Homo sapiens; identical to SEQ ID NO: 376210
  chr2:3352710-3353003
  hypo
  myeloid_neoplasm vs. lung,anorectal

SEQ ID NO: 471969 - DNA, 154 bp, Homo sapiens; identical to SEQ ID NO: 337503
  chr2:7907371-7907525
  hypo
  myeloid_neoplasm vs. breast,uterine,prostate,renal, non_cancer

SEQ ID NO: 471970 - DNA, 8 bp, Homo sapiens
  chr2:8658301-8658309
  hypo
  myeloid_neoplasm vs. lung,pancreas_gallbladder
cgggagtg

SEQ ID NO: 471971 - DNA, 97 bp, Homo sapiens; identical to SEQ ID NO: 362800
  chr2:8658450-8658547
  hypo
  myeloid_neoplasm vs. lung,pancreas_gallbladder

SEQ ID NO: 471972 - DNA, 17 bp, Homo sapiens
  chr2:9289953-9289970
  hypo
cggtttcttgtctgtgt

SEQ ID NO: 471973 - DNA, 372 bp, Homo sapiens; identical to SEQ ID NO: 337522
  chr2:9609477-9609849
  hypo
  myeloid_neoplasm vs. colorectal,renal, bladder_and_urothelial,pancreas_gallbladder,lung,upper_gi, liver_bileduct,melanoma,prostate,lymphoid_neoplasm, head_and_neck,breast

SEQ ID NO: 471974 - DNA, 305 bp, Homo sapiens
  chr2:10150733-10151038
  hypo
  myeloid_neoplasm vs. pancreas_gallbladder,liver_bileduct, prostate,lung,breast,upper_gi,ovary,melanoma,sarcoma,uterine, cervical,lymphoid_neoplasm
cgggtcaggtggacaggcatgtgtatgggcaggtcaggtggccaggcgtgcgtatgggcgagtgaggtgggcaggcaagtgaggtgggcaggcgtgcatgtgggcgagtcaggtgggcaggcgtgggtgtgggcgagtctggacaggcgtgcatacgggcgggtcaggtgggcaggcgtttgtatgggcgggtcaggtgggcagacgtgtgtatggtcggtttaggtggacaggcttgagtatgggtgtgcgtatggacgagtcaggtggacaggcgtgcgtatgggagagtcaggtggacaggc

SEQ ID NO: 471975 - DNA, 4 bp, Homo sapiens
  chr2:10151899-10151903
  hypo
  myeloid_neoplasm vs. sarcoma,renal,breast,uterine, lymphoid_neoplasm,liver_bileduct,non_cancer,prostate,thyroid
cgta

SEQ ID NO: 471976 - DNA, 2 bp, Homo sapiens
  chr2:10152022-10152024
  hypo
  myeloid_neoplasm vs. sarcoma,renal,breast,uterine, lymphoid_neoplasm,liver_bileduct,non_cancer,prostate,thyroid
gc

SEQ ID NO: 471977 - DNA, 126 bp, Homo sapiens; identical to SEQ ID NO: 337536
  chr2:10328941-10329067
  hypo
  myeloid_neoplasm vs. thyroid

SEQ ID NO: 471978 - DNA, 55 bp, Homo sapiens; identical to SEQ ID NO: 347881
  chr2:10600813-10600868
  hypo
  myeloid_neoplasm vs. pancreas_gallbladder

SEQ ID NO: 471979 - DNA, 270 bp, Homo sapiens; identical to SEQ ID NO: 337550
  chr2:11965015-11965285
  hypo
  myeloid_neoplasm vs. melanoma

SEQ ID NO: 471980 - DNA, 388 bp, Homo sapiens; identical to SEQ ID NO: 471147
  chr2:20646879-20647267
  hypo
  myeloid_neoplasm vs. sarcoma,renal,liver_bileduct

SEQ ID NO: 471981 - DNA, 93 bp, Homo sapiens; identical to SEQ ID NO: 331235
  chr2:25464444-25464537
  hypo
  myeloid_neoplasm vs. lung,head_and_neck, lymphoid_neoplasm,colorectal,bladder_and_urothelial

SEQ ID NO: 471982 - DNA, 101 bp, Homo sapiens; identical to SEQ ID NO: 337573
  chr2:25623195-25623296
  hypo
  myeloid_neoplasm vs. head_and_neck

SEQ ID NO: 471983 - DNA, 251 bp, Homo sapiens; identical to SEQ ID NO: 471150
  chr2:27308893-27309144
  hypo
  myeloid_neoplasm vs. multiple_myeloma,lung,colorectal, upper_gi,uterine,bladder_and_urothelial,prostate, lymphoid_neoplasm,melanoma,head_and_neck,non_cancer,breast

SEQ ID NO: 471984 - DNA, 111 bp, Homo sapiens; identical to SEQ ID NO: 1396
  chr2:27309206-27309317
  hypo
  myeloid_neoplasm vs. multiple_myeloma,lung,colorectal, upper_gi,uterine,bladder_and_urothelial,prostate, lymphoid_neoplasm,melanoma,head_and_neck,non_cancer,breast

SEQ ID NO: 471985 - DNA, 66 bp, Homo sapiens
  chr2:47200517-47200583
  hypo
  myeloid_neoplasm vs. sarcoma
cgagagccttccagccaccgcatggtgcagggaaacccttgctaccctcatttatcccccgtcagg

SEQ ID NO: 471986 - DNA, 280 bp, Homo sapiens; identical to SEQ ID NO: 331330
  chr2:70369049-70369329
  hypo
  myeloid_neoplasm vs. lymphoid_neoplasm,liver_bileduct, renal,lung

SEQ ID NO: 471987 - DNA, 125 bp, Homo sapiens; identical to SEQ ID NO: 337645
  chr2:72310184-72310309
  hypo
  myeloid_neoplasm vs. thyroid

SEQ ID NO: 471988 - DNA, 698 bp, Homo sapiens; identical to SEQ ID NO: 357207
  chr2:73052641-73053339
  hypo
  myeloid_neoplasm vs. ovary

SEQ ID NO: 471989 - DNA, 937 bp, Homo sapiens; identical to SEQ ID NO: 462696
  chr2:75060920-75061857
  hypo
  myeloid_neoplasm vs. upper_gi,colorectal,ovary, bladder_and_urothelial

SEQ ID NO: 471990 - DNA, 158 bp, Homo sapiens; identical to SEQ ID NO: 337682
  chr2:97530642-97530800
  hypo
  myeloid_neoplasm vs. head_and_neck,upper_gi

SEQ ID NO: 471991 - DNA, 383 bp, Homo sapiens
  chr2:98350752-98351135
  hypo
  myeloid_neoplasm vs. melanoma
cgcccctagagtccaccctcatgtggcttcatggggcacccacagctgtggccaggagtgtatgccagtgtgtgcgtgtggatgtgcaggaacacgcatgggcacccacctgcttgtgcatgctccagggacggcacccttgtctggggcaggtgcttgtgggggctgaggctgccttgctccccacacccctgcccctgacctgggagtgtaccgctgtgtgtgcccagcacgcataacgtccccagacaaaccgcggccgatgcccatggacacgagcgtgtatgagagcccctacagcgacccagaggagctcaaggacaagaagctcttcctgaagcgcgataacctcctcatagctgacattgaacttggctgcggca

SEQ ID NO: 471992 - DNA, 572 bp, Homo sapiens; identical to SEQ ID NO: 337691
  chr2:98408820-98409392
  hypo
  myeloid_neoplasm vs. liver_bileduct

SEQ ID NO: 471993 - DNA, 35 bp, Homo sapiens; identical to SEQ ID NO: 337709
  chr2:106742088-106742123
  hypo
  myeloid_neoplasm vs. thyroid,renal,uterine, liver_bileduct,lymphoid_neoplasm,colorectal,prostate

SEQ ID NO: 471994 - DNA, 205 bp, Homo sapiens; identical to SEQ ID NO: 337718
  chr2:110011299-110011504
  hypo
  myeloid_neoplasm vs. breast,thyroid,non_cancer,prostate, colorectal,uterine,lymphoid_neoplasm

SEQ ID NO: 471995 - DNA, 215 bp, Homo sapiens; identical to SEQ ID NO: 362962
  chr2:110016725-110016940
  hypo
  myeloid_neoplasm vs. prostate,anorectal, bladder_and_urothelial,breast,cervical

SEQ ID NO: 471996 - DNA, 146 bp, Homo sapiens; identical to SEQ ID NO: 337725
  chr2:110048964-110049110
  hypo
  myeloid_neoplasm vs. breast,thyroid

SEQ ID NO: 471997 - DNA, 330 bp, Homo sapiens; identical to SEQ ID NO: 353167
  chr2:120974105-120974435
  hypo
  myeloid_neoplasm vs. head_and_neck,pancreas_gallbladder, ovary,renal,cervical,breast

SEQ ID NO: 471998 - DNA, 83 bp, Homo sapiens
  chr2:127801072-127801155
  hypo
  myeloid_neoplasm vs. melanoma
cgcagccgaggaggggctcagccgtctaccctgtctccagcggaggagcttctgagaccaggagcgggggccgtcgggtgagc

SEQ ID NO: 471999 - DNA, 117 bp, Homo sapiens; identical to SEQ ID NO: 376445
  chr2:127801235-127801352
  hypo
  myeloid_neoplasm vs. melanoma

SEQ ID NO: 472000 - DNA, 587 bp, Homo sapiens; identical to SEQ ID NO: 376450
  chr2:128158471-128159058
  hypo
  myeloid_neoplasm vs. upper_gi

SEQ ID NO: 472001 - DNA, 110 bp, Homo sapiens; identical to SEQ ID NO: 353176
  chr2:131487004-131487114
  hypo
  myeloid_neoplasm vs. cervical,prostate,colorectal

SEQ ID NO: 472002 - DNA, 295 bp, Homo sapiens; identical to SEQ ID NO: 337771
  chr2:132301071-132301366
  hypo
  myeloid_neoplasm vs. melanoma,anorectal

SEQ ID NO: 472003 - DNA, 186 bp, Homo sapiens; identical to SEQ ID NO: 331461
  chr2:148602743-148602929
  hypo
  myeloid_neoplasm vs. multiple_myeloma,liver_bileduct

SEQ ID NO: 472004 - DNA, 461 bp, Homo sapiens; identical to SEQ ID NO: 349603
  chr2:157292161-157292622
  hypo
  myeloid_neoplasm vs. pancreas_gallbladder,breast,sarcoma, melanoma,head_and_neck,cervical,renal,uterine,liver_bileduct, upper_gi,lung,non_cancer,thyroid,anorectal

SEQ ID NO: 472005 - DNA, 99 bp, Homo sapiens; identical to SEQ ID NO: 455094
  chr2:233198455-233198554
  hypo
  myeloid_neoplasm vs. thyroid

SEQ ID NO: 472006 - DNA, 129 bp, Homo sapiens; identical to SEQ ID NO: 353240
  chr2:233198583-233198712
  hypo
  myeloid_neoplasm vs. thyroid

SEQ ID NO: 472007 - DNA, 254 bp, Homo sapiens; identical to SEQ ID NO: 357495
  chr2:233283897-233284151
  hypo
  myeloid_neoplasm vs. lung,multiple_myeloma

SEQ ID NO: 472008 - DNA, 49 bp, Homo sapiens
  chr2:234737283-234737332
  hypo
  myeloid_neoplasm vs. prostate
cggcccagttctgtaccaggagaagctgctgaagccggcagctttgctg

SEQ ID NO: 472009 - DNA, 273 bp, Homo sapiens; identical to SEQ ID NO: 363108
  chr2:234737409-234737682
  hypo
  myeloid_neoplasm vs. prostate

SEQ ID NO: 472010 - DNA, 350 bp, Homo sapiens; identical to SEQ ID NO: 337908
  chr2:235950041-235950391
  hypo
  myeloid_neoplasm vs. liver_bileduct

SEQ ID NO: 472011 - DNA, 412 bp, Homo sapiens; identical to SEQ ID NO: 337909
  chr2:235961011-235961423
  hypo
  myeloid_neoplasm vs. upper_gi,ovary

SEQ ID NO: 472012 - DNA, 172 bp, Homo sapiens; identical to SEQ ID NO: 337912
  chr2:236459184-236459356
  hypo
  myeloid_neoplasm vs. head_and_neck,renal,lung

SEQ ID NO: 472013 - DNA, 640 bp, Homo sapiens; identical to SEQ ID NO: 337914
  chr2:236648390-236649030
  hypo
  myeloid_neoplasm vs. liver_bileduct,thyroid,breast, melanoma,colorectal,renal,uterine,bladder_and_urothelial,lung, prostate,head_and_neck,pancreas_gallbladder,non_cancer, lymphoid_neoplasm,upper_gi

SEQ ID NO: 472014 - DNA, 366 bp, Homo sapiens; identical to SEQ ID NO: 337917
  chr2:236685979-236686345
  hypo
  myeloid_neoplasm vs. pancreas_gallbladder

SEQ ID NO: 472015 - DNA, 131 bp, Homo sapiens; identical to SEQ ID NO: 337919
  chr2:236791021-236791152
  hypo
  myeloid_neoplasm vs. cervical

SEQ ID NO: 472016 - DNA, 317 bp, Homo sapiens; identical to SEQ ID NO: 337920
  chr2:236801881-236802198
  hypo
  myeloid_neoplasm vs. upper_gi

SEQ ID NO: 472017 - DNA, 544 bp, Homo sapiens; identical to SEQ ID NO: 337922
  chr2:236839051-236839595
  hypo
  myeloid_neoplasm vs. head_and_neck,lymphoid_neoplasm

SEQ ID NO: 472018 - DNA, 64 bp, Homo sapiens; identical to SEQ ID NO: 337924
  chr2:236897051-236897115
  hypo
  myeloid_neoplasm vs. liver_bileduct

SEQ ID NO: 472019 - DNA, 139 bp, Homo sapiens; identical to SEQ ID NO: 337926
  chr2:237018173-237018312
  hypo
  myeloid_neoplasm vs. head_and_neck,ovary,breast

SEQ ID NO: 472020 - DNA, 161 bp, Homo sapiens; identical to SEQ ID NO: 337949
  chr2:240061326-240061487
  hypo
  myeloid_neoplasm vs. liver_bileduct

SEQ ID NO: 472021 - DNA, 139 bp, Homo sapiens; identical to SEQ ID NO: 363145
  chr2:240165157-240165296
  hypo
  myeloid_neoplasm vs. lung,pancreas_gallbladder, liver_bileduct

SEQ ID NO: 472022 - DNA, 95 bp, Homo sapiens; identical to SEQ ID NO: 353262
  chr2:240316126-240316221
  hypo
  myeloid_neoplasm vs. melanoma,head_and_neck,thyroid, anorectal,pancreas_gallbladder

SEQ ID NO: 472023 - DNA, 44 bp, Homo sapiens; identical to SEQ ID NO: 463647
  chr2:240690358-240690402
  hypo
  myeloid_neoplasm vs. lymphoid_neoplasm,uterine

SEQ ID NO: 472024 - DNA, 136 bp, Homo sapiens; identical to SEQ ID NO: 363169
  chr2:241697788-241697924
  hypo
  myeloid_neoplasm vs. pancreas_gallbladder

SEQ ID NO: 472025 - DNA, 196 bp, Homo sapiens; identical to SEQ ID NO: 353267
  chr2:241989264-241989460
  hypo
  myeloid_neoplasm vs. liver_bileduct, bladder_and_urothelial

SEQ ID NO: 472026 - DNA, 56 bp, Homo sapiens; identical to SEQ ID NO: 363172
  chr2:242148880-242148936
  hypo
  myeloid_neoplasm vs. thyroid,anorectal

SEQ ID NO: 472027 - DNA, 726 bp, Homo sapiens; identical to SEQ ID NO: 338003
  chr2:242664623-242665349
  hypo
  myeloid_neoplasm vs. liver_bileduct,renal

SEQ ID NO: 472028 - DNA, 130 bp, Homo sapiens; identical to SEQ ID NO: 338007
  chr2:242793077-242793207
  hypo
  myeloid_neoplasm vs. anorectal

SEQ ID NO: 472029 - DNA, 114 bp, Homo sapiens; identical to SEQ ID NO: 461836
  chr2:242815156-242815270
  hypo
  myeloid_neoplasm vs. renal,prostate,non_cancer,anorectal, multiple_myeloma

SEQ ID NO: 472030 - DNA, 236 bp, Homo sapiens; identical to SEQ ID NO: 344146
  chr20:371973-372209
  hypo
  myeloid_neoplasm vs. sarcoma

SEQ ID NO: 472031 - DNA, 63 bp, Homo sapiens; identical to SEQ ID NO: 361804
  chr20:5297756-5297819
  hypo
  myeloid_neoplasm vs. cervical

SEQ ID NO: 472032 - DNA, 164 bp, Homo sapiens; identical to SEQ ID NO: 344170
  chr20:10687213-10687377
  hypo
  myeloid_neoplasm vs. cervical

SEQ ID NO: 472033 - DNA, 17 bp, Homo sapiens
  chr20:24524102-24524119
  hypo
  myeloid_neoplasm vs. thyroid,anorectal
gacagcctcgagtaccc

SEQ ID NO: 472034 - DNA, 297 bp, Homo sapiens; identical to SEQ ID NO: 344190
  chr20:25231684-25231981
  hypo
  myeloid_neoplasm vs. thyroid

SEQ ID NO: 472035 - DNA, 270 bp, Homo sapiens; identical to SEQ ID NO: 356259
  chr20:30772699-30772969
  hypo
  myeloid_neoplasm vs. thyroid,cervical

SEQ ID NO: 472036 - DNA, 145 bp, Homo sapiens; identical to SEQ ID NO: 344207
  chr20:32250068-32250213
  hypo
  myeloid_neoplasm vs. bladder_and_urothelial,ovary

SEQ ID NO: 472037 - DNA, 1 bp, Homo sapiens
  chr20:33134788-33134789
  hypo
  myeloid_neoplasm vs. uterine,prostate,anorectal,thyroid, non_cancer,renal,breast,ovary,cervical
c

SEQ ID NO: 472038 - DNA, 73 bp, Homo sapiens; identical to SEQ ID NO: 460299
  chr20:34147099-34147172
  hypo
  myeloid_neoplasm vs. head_and_neck

SEQ ID NO: 472039 - DNA, 131 bp, Homo sapiens; identical to SEQ ID NO: 356268
  chr20:34147230-34147361
  hypo
  myeloid_neoplasm vs. head_and_neck

SEQ ID NO: 472040 - DNA, 64 bp, Homo sapiens; identical to SEQ ID NO: 344226
  chr20:35929641-35929705
  hypo
  myeloid_neoplasm vs. head_and_neck

SEQ ID NO: 472041 - DNA, 215 bp, Homo sapiens; identical to SEQ ID NO: 347677
  chr20:43976984-43977199
  hypo
  myeloid_neoplasm vs. liver_bileduct,colorectal, pancreas_gallbladder,prostate,lung,upper_gi,sarcoma,ovary, uterine,melanoma,breast,cervical,renal,non_cancer,head_and_neck, thyroid,bladder_and_urothelial,anorectal,lymphoid_neoplasm

SEQ ID NO: 472042 - DNA, 57 bp, Homo sapiens; identical to SEQ ID NO: 453879
  chr20:58514041-58514098
  hypo
  myeloid_neoplasm vs. sarcoma,renal,colorectal

SEQ ID NO: 472043 - DNA, 115 bp, Homo sapiens; identical to SEQ ID NO: 345644
  chr20:58514400-58514515
  hypo
  myeloid_neoplasm vs. sarcoma,renal,colorectal

SEQ ID NO: 472044 - DNA, 106 bp, Homo sapiens
  chr20:60495300-60495406
  hypo
  myeloid_neoplasm vs. thyroid
cgtggtgtcacagtgattgcatggaagcgtgtcatgattgtgtggaagcatggtatcgtgattgtgtggaagcgtggtgtgattgtgtggaagcgtggtgtcatag

SEQ ID NO: 472045 - DNA, 268 bp, Homo sapiens
  chr20:60495440-60495708
  hypo
  myeloid_neoplasm vs. thyroid
ggtgtcgcggtgattgtgtggaagtgtggtgtgattgcgtggaagcgtgtcttggtgattgcatggaaatgtgtgattgcatggaagcgcagtgtcacggtgattgtgtggaagcgtgtcatggtgattatgtggaagtgtggtgtcgtgatgattgcatggaagcaccgtgtcatggtgattgtgtggaaatgtggtgtgattgcgtggaagcgtggtgtcacagtgattgcatggaagtgtggtgtcacagtgattgcatggaagc

SEQ ID NO: 472046 - DNA, 252 bp, Homo sapiens; identical to SEQ ID NO: 344367
  chr20:60912922-60913174
  hypo
  myeloid_neoplasm vs. liver_bileduct

SEQ ID NO: 472047 - DNA, 68 bp, Homo sapiens
  chr20:61013047-61013115
  hypo
  myeloid_neoplasm vs. liver_bileduct
cgactgcccggggctcagcgggcaggcagggagatgcctcaggactcacgggtgaggggtgttgggcg

SEQ ID NO: 472048 - DNA, 56 bp, Homo sapiens
  chr20:61013193-61013249
  hypo
  myeloid_neoplasm vs. liver_bileduct
gggagctggcagctgagtgccatccttccaaagacgtggtgctccagggcgcatgg

SEQ ID NO: 472049 - DNA, 120 bp, Homo sapiens; identical to SEQ ID NO: 368457
  chr20:61013278-61013398
  hypo
  myeloid_neoplasm vs. liver_bileduct

SEQ ID NO: 472050 - DNA, 116 bp, Homo sapiens
  chr20:61330805-61330921
  hypo
  myeloid_neoplasm vs. pancreas_gallbladder,sarcoma, colorectal,upper_gi,renal,non_cancer,breast,thyroid
cgcccagcctctggtgttgtgtgtcagcaccccgagtggaccgggacaggctcccaagtggactgagacaggctcccgagtggaccgggacaggctcccgagtggactggagacag

SEQ ID NO: 472051 - DNA, 90 bp, Homo sapiens
  chr20:62204139-62204229
  hypo
  myeloid_neoplasm vs. melanoma
cgcgactgcgggcaaaggtgcaccggtttcggtggcgccggcagccgagcccagggctgtagtagtggcagacttggtagcacaggggcc

SEQ ID NO: 472052 - DNA, 95 bp, Homo sapiens; identical to SEQ ID NO: 368483
  chr20:62204387-62204482
  hypo
  myeloid_neoplasm vs. melanoma

SEQ ID NO: 472053 - DNA, 390 bp, Homo sapiens; identical to SEQ ID NO: 347694
  chr20:62273399-62273789
  hypo
  myeloid_neoplasm vs. breast,uterine,ovary,lung, multiple_myeloma,colorectal,liver_bileduct,anorectal,upper_gi, non_cancer,thyroid,pancreas_gallbladder,prostate,cervical, head_and_neck,renal

SEQ ID NO: 472054 - DNA, 103 bp, Homo sapiens; identical to SEQ ID NO: 344414
  chr20:62310122-62310225
  hypo
  myeloid_neoplasm vs. anorectal,renal,prostate, liver_bileduct,non_cancer,colorectal,head_and_neck,melanoma, lung,uterine,breast,bladder_and_urothelial,cervical,upper_gi, thyroid,pancreas_gallbladder

SEQ ID NO: 472055 - DNA, 306 bp, Homo sapiens
  chr20:62513518-62513824
  hypo
  myeloid_neoplasm vs. liver_bileduct
cgctcgttccccacagacgtggttgagcttgcattttctcccctcagcacagtctcatttgggaagaggaaagggaaacttgcacgcatgggccggtcagggcactgagaggcctttctgctctggcactgcctgccaggcgtgcacctcagggggcccgtccgctctagcaggcaaatggggcgtgttctctgtagtcagaggggctgtgagaagacaggaaagcgagcttagtgggtatcaggcaagggggtgaaattgggttgtgagatgagaaagcagcgtcattgcagggctggggggccg

SEQ ID NO: 472056 - DNA, 45 bp, Homo sapiens; identical to SEQ ID NO: 368497
  chr20:62513897-62513942
  hypo
  myeloid_neoplasm vs. liver_bileduct

SEQ ID NO: 472057 - DNA, 98 bp, Homo sapiens; identical to SEQ ID NO: 344429
  chr20:62581888-62581986
  hypo

SEQ ID NO: 472058 - DNA, 6 bp, Homo sapiens
  chr20:62839587-62839593
  hypo
  myeloid_neoplasm vs. sarcoma,cervical
cgctcg

SEQ ID NO: 472059 - DNA, 100 bp, Homo sapiens; identical to SEQ ID NO: 368511
  chr20:62839658-62839758
  hypo
  myeloid_neoplasm vs. sarcoma,cervical

SEQ ID NO: 472060 - DNA, 58 bp, Homo sapiens
  chr20:62863342-62863400
  hypo
  myeloid_neoplasm vs. thyroid,prostate,renal,cervical, bladder_and_urothelial
cggaagggccagttcttccctgaggctccaggacctcagcggccctccctgcctcact

SEQ ID NO: 472061 - DNA, 243 bp, Homo sapiens
  chr20:62863429-62863672
  hypo
  myeloid_neoplasm vs. thyroid,prostate,renal,cervical, bladder_and_urothelial
ctccccttgtgtctggcttgagagagtctccaggcttctcctcccaacccttcgcccctgtactcaccccggcctctctgtacccaggtgcccagttccaggctgtgtggggctcggtcacatcagcgggaaatacgcctctcacaggagcgcatccggctgcccactggccgcccgcaggcagaaggaagggtccctcaatggctcgtcattctcctggaagtccctgaagaatgaaggacc

SEQ ID NO: 472062 - DNA, 8 bp, Homo sapiens
  chr20:62863701-62863709
  hypo
  myeloid_neoplasm vs. thyroid,prostate,renal,cervical, bladder_and_urothelial
ctggccac

SEQ ID NO: 472063 - DNA, 881 bp, Homo sapiens; identical to SEQ ID NO: 336551
  chr21:36163875-36164756
  hypo
  myeloid_neoplasm vs. liver_bileduct,head_and_neck,renal

SEQ ID NO: 472064 - DNA, 246 bp, Homo sapiens; identical to SEQ ID NO: 344466
  chr21:37582287-37582533
  hypo
  myeloid_neoplasm vs. sarcoma,prostate

SEQ ID NO: 472065 - DNA, 338 bp, Homo sapiens; identical to SEQ ID NO: 383192
  chr21:40506192-40506530
  hypo
  myeloid_neoplasm vs. thyroid,anorectal

SEQ ID NO: 472066 - DNA, 91 bp, Homo sapiens
  chr21:42613666-42613757
  hypo
  myeloid_neoplasm vs. lymphoid_neoplasm
cgcgtggcgtctacactgggtgacccatgtctacactgtgagtcctaagcgggtgcccctctctgtcgccctcccgcagccatcaagttct

SEQ ID NO: 472067 - DNA, 82 bp, Homo sapiens; identical to SEQ ID NO: 356390
  chr21:42613819-42613901
  hypo
  myeloid_neoplasm vs. lymphoid_neoplasm

SEQ ID NO: 472068 - DNA, 147 bp, Homo sapiens; identical to SEQ ID NO: 470482
  chr21:42617817-42617964
  hypo
  myeloid_neoplasm vs. cervical,lymphoid_neoplasm, head_and_neck,sarcoma,prostate,melanoma,bladder_and_urothelial, anorectal,colorectal,uterine,breast,pancreas_gallbladder, non_cancer,upper_gi,renal,lung,thyroid,ovary

SEQ ID NO: 472069 - DNA, 92 bp, Homo sapiens; identical to SEQ ID NO: 346250
  chr21:42617995-42618087
  hypo
  myeloid_neoplasm vs. cervical,lymphoid_neoplasm, head_and_neck,sarcoma,prostate,melanoma,bladder_and_urothelial, anorectal,colorectal,uterine,breast,pancreas_gallbladder, non_cancer,upper_gi,renal,lung,thyroid,ovary

SEQ ID NO: 472070 - DNA, 824 bp, Homo sapiens; identical to SEQ ID NO: 356394
  chr21:43160967-43161791
  hypo
  myeloid_neoplasm vs. liver_bileduct,sarcoma

SEQ ID NO: 472071 - DNA, 283 bp, Homo sapiens; identical to SEQ ID NO: 344495
  chr21:43161857-43162140
  hypo
  myeloid_neoplasm vs. bladder_and_urothelial,thyroid, ovary

SEQ ID NO: 472072 - DNA, 333 bp, Homo sapiens; identical to SEQ ID NO: 383218
  chr21:43725921-43726254
  hypo
  myeloid_neoplasm vs. head_and_neck

SEQ ID NO: 472073 - DNA, 114 bp, Homo sapiens; identical to SEQ ID NO: 356403
  chr21:44110034-44110148
  hypo
  myeloid_neoplasm vs. upper_gi,lymphoid_neoplasm, head_and_neck,bladder_and_urothelial,lung,sarcoma,colorectal, ovary,uterine,pancreas_gallbladder,melanoma,cervical,breast, non_cancer,prostate,thyroid,anorectal,renal

SEQ ID NO: 472074 - DNA, 445 bp, Homo sapiens; identical to SEQ ID NO: 383241
  chr21:45114158-45114603
  hypo
  myeloid_neoplasm vs. multiple_myeloma

SEQ ID NO: 472075 - DNA, 105 bp, Homo sapiens; identical to SEQ ID NO: 344539
  chr21:45499846-45499951
  hypo
  myeloid_neoplasm vs. liver_bileduct

SEQ ID NO: 472076 - DNA, 98 bp, Homo sapiens; identical to SEQ ID NO: 344545
  chr21:45617247-45617345
  hypo
  myeloid_neoplasm vs. lymphoid_neoplasm, bladder_and_urothelial,uterine,upper_gi,breast,colorectal, thyroid,anorectal,lung,head_and_neck,prostate,non_cancer, pancreas_gallbladder,liver_bileduct,renal,ovary

SEQ ID NO: 472077 - DNA, 236 bp, Homo sapiens; identical to SEQ ID NO: 344547
  chr21:45628864-45629100
  hypo

SEQ ID NO: 472078 - DNA, 226 bp, Homo sapiens; identical to SEQ ID NO: 344552
  chr21:45834132-45834358
  hypo
  myeloid_neoplasm vs. upper_gi,colorectal,renal

SEQ ID NO: 472079 - DNA, 285 bp, Homo sapiens; identical to SEQ ID NO: 368607
  chr21:46155048-46155333
  hypo
  myeloid_neoplasm vs. pancreas_gallbladder, lymphoid_neoplasm

SEQ ID NO: 472080 - DNA, 55 bp, Homo sapiens
  chr21:46315941-46315996
  hypo
  myeloid_neoplasm vs. melanoma
cgcctgcggtgtgagtgctcccgcctgcggtgtgagtgatcccgcctgcagtgtg

SEQ ID NO: 472081 - DNA, 1 bp, Homo sapiens
  chr21:46316025-46316026
  hypo
  myeloid_neoplasm vs. melanoma
c

SEQ ID NO: 472082 - DNA, 98 bp, Homo sapiens; identical to SEQ ID NO: 336586
  chr21:46686353-46686451
  hypo
  myeloid_neoplasm vs. head_and_neck

SEQ ID NO: 472083 - DNA, 391 bp, Homo sapiens; identical to SEQ ID NO: 456907
  chr21:46935349-46935740
  hypo
  myeloid_neoplasm vs. melanoma

SEQ ID NO: 472084 - DNA, 505 bp, Homo sapiens; identical to SEQ ID NO: 470561
  chr21:47413791-47414296
  hypo
  myeloid_neoplasm vs. renal,prostate

SEQ ID NO: 472085 - DNA, 44 bp, Homo sapiens; identical to SEQ ID NO: 356466
  chr21:47414327-47414371
  hypo
  myeloid_neoplasm vs. renal,prostate

SEQ ID NO: 472086 - DNA, 25 bp, Homo sapiens
  chr21:47421372-47421397
  hypo
  myeloid_neoplasm vs. melanoma
cagacctcagcctcccgaggccacc

SEQ ID NO: 472087 - DNA, 68 bp, Homo sapiens
  chr21:47689571-47689639
  hypo
  myeloid_neoplasm vs. upper_gi
cgctgtggccactacgggcttgtggcaaggaatcctggcagcctccttggagccgctgccagaatggg

SEQ ID NO: 472088 - DNA, 129 bp, Homo sapiens; identical to SEQ ID NO: 346275
  chr21:47689700-47689829
  hypo
  myeloid_neoplasm vs. upper_gi

SEQ ID NO: 472089 - DNA, 67 bp, Homo sapiens; identical to SEQ ID NO: 356473
  chr21:47918529-47918596
  hypo
  myeloid_neoplasm vs. breast,cervical,anorectal,lung, prostate,upper_gi,uterine

SEQ ID NO: 472090 - DNA, 119 bp, Homo sapiens
  chr22:18265358-18265477
  hypo
  myeloid_neoplasm vs. sarcoma
cgatctgaccccgtggcatccttcctttcctacaaactgcactgagacccaggtgtcatcgtgaagttcatgccagccagaggagccactgtggcgtttccggccataggcctgggcag

SEQ ID NO: 472091 - DNA, 196 bp, Homo sapiens; identical to SEQ ID NO: 356476
  chr22:18265523-18265719
  hypo
  myeloid_neoplasm vs. sarcoma

SEQ ID NO: 472092 - DNA, 206 bp, Homo sapiens; identical to SEQ ID NO: 383386
  chr22:19799727-19799933
  hypo
  myeloid_neoplasm vs. colorectal

SEQ ID NO: 472093 - DNA, 187 bp, Homo sapiens; identical to SEQ ID NO: 344676
  chr22:21011052-21011239
  hypo
  myeloid_neoplasm vs. sarcoma,melanoma,colorectal

SEQ ID NO: 472094 - DNA, 98 bp, Homo sapiens; identical to SEQ ID NO: 465538
  chr22:22057979-22058077
  hypo
  myeloid_neoplasm vs. melanoma,cervical,non_cancer,ovary, anorectal,breast,renal,bladder_and_urothelial,prostate,thyroid, liver_bileduct

SEQ ID NO: 472095 - DNA, 279 bp, Homo sapiens; identical to SEQ ID NO: 344686
  chr22:22068426-22068705
  hypo
  myeloid_neoplasm vs. ovary

SEQ ID NO: 472096 - DNA, 354 bp, Homo sapiens; identical to SEQ ID NO: 336607
  chr22:22292773-22293127
  hypo
  myeloid_neoplasm vs. lymphoid_neoplasm,multiple_myeloma, lung

SEQ ID NO: 472097 - DNA, 500 bp, Homo sapiens; identical to SEQ ID NO: 456915
  chr22:23800960-23801460
  hypo
  myeloid_neoplasm vs. bladder_and_urothelial,ovary

SEQ ID NO: 472098 - DNA, 28 bp, Homo sapiens
  chr22:23801610-23801638
  hypo
  myeloid_neoplasm vs. bladder_and_urothelial,ovary
tgaggttcacgtttccccggtgcccggc

SEQ ID NO: 472099 - DNA, 180 bp, Homo sapiens
  chr22:24205104-24205284
  hypo
  myeloid_neoplasm vs. sarcoma,head_and_neck
cggtctcatcaatgttatttataaagtagccagtggagattaagtttccgtgttcagcggtgaagccttgagctatcacggcctcagcttcatggaaaaaggaagaagaaattttaaaaagcaagcagggcaggcagacctgaccaaatgaacccctcggtttcactgtctcacaccttc

SEQ ID NO: 472100 - DNA, 174 bp, Homo sapiens; identical to SEQ ID NO: 457951
  chr22:24819901-24820075
  hypo
  myeloid_neoplasm vs. non_cancer,thyroid,anorectal

SEQ ID NO: 472101 - DNA, 61 bp, Homo sapiens; identical to SEQ ID NO: 295272
  chr22:24820486-24820547
  hypo
  myeloid_neoplasm vs. non_cancer,thyroid,anorectal

SEQ ID NO: 472102 - DNA, 305 bp, Homo sapiens; identical to SEQ ID NO: 344700
  chr22:25561932-25562237
  hypo
  myeloid_neoplasm vs. anorectal

SEQ ID NO: 472103 - DNA, 99 bp, Homo sapiens; identical to SEQ ID NO: 344730
  chr22:31260817-31260916
  hypo
  myeloid_neoplasm vs. breast

SEQ ID NO: 472104 - DNA, 163 bp, Homo sapiens; identical to SEQ ID NO: 344732
  chr22:31475566-31475729
  hypo
  myeloid_neoplasm vs. melanoma

SEQ ID NO: 472105 - DNA, 345 bp, Homo sapiens; identical to SEQ ID NO: 356525
  chr22:31489493-31489838
  hypo
  myeloid_neoplasm vs. pancreas_gallbladder,head_and_neck, cervical

SEQ ID NO: 472106 - DNA, 69 bp, Homo sapiens
  chr22:31494664-31494733
  hypo
  myeloid_neoplasm vs. lung,lymphoid_neoplasm
cgaggaccaggccagcccacgggccggcagcctggcggcgctcgagaaacggcaggccgagaagaagaa

SEQ ID NO: 472107 - DNA, 68 bp, Homo sapiens; identical to SEQ ID NO: 383460
  chr22:31494797-31494865
  hypo
  myeloid_neoplasm vs. lung,lymphoid_neoplasm

SEQ ID NO: 472108 - DNA, 127 bp, Homo sapiens; identical to SEQ ID NO: 344749
  chr22:36519474-36519601
  hypo
  myeloid_neoplasm vs. liver_bileduct,head_and_neck, anorectal,lung,cervical

SEQ ID NO: 472109 - DNA, 800 bp, Homo sapiens; identical to SEQ ID NO: 356533
  chr22:38379141-38379941
  hypo
  myeloid_neoplasm vs. upper_gi,cervical,uterine, liver_bileduct,bladder_and_urothelial,lung,pancreas_gallbladder, head_and_neck,prostate,lymphoid_neoplasm,sarcoma,colorectal, breast

SEQ ID NO: 472110 - DNA, 230 bp, Homo sapiens; identical to SEQ ID NO: 344762
  chr22:38381994-38382224
  hypo
  myeloid_neoplasm vs. ovary,renal

SEQ ID NO: 472111 - DNA, 592 bp, Homo sapiens; identical to SEQ ID NO: 456925
  chr22:38434385-38434977
  hypo
  myeloid_neoplasm vs. lymphoid_neoplasm

SEQ ID NO: 472112 - DNA, 146 bp, Homo sapiens; identical to SEQ ID NO: 356535
  chr22:38435006-38435152
  hypo
  myeloid_neoplasm vs. lymphoid_neoplasm

SEQ ID NO: 472113 - DNA, 84 bp, Homo sapiens; identical to SEQ ID NO: 368790
  chr22:38687297-38687381
  hypo
  myeloid_neoplasm vs. liver_bileduct

SEQ ID NO: 472114 - DNA, 391 bp, Homo sapiens; identical to SEQ ID NO: 368791
  chr22:38694593-38694984
  hypo
  myeloid_neoplasm vs. sarcoma

SEQ ID NO: 472115 - DNA, 219 bp, Homo sapiens; identical to SEQ ID NO: 344774
  chr22:39756401-39756620
  hypo
  myeloid_neoplasm vs. head_and_neck,melanoma

SEQ ID NO: 472116 - DNA, 53 bp, Homo sapiens; identical to SEQ ID NO: 344779
  chr22:40061917-40061970
  hypo
  myeloid_neoplasm vs. sarcoma,prostate,melanoma

SEQ ID NO: 472117 - DNA, 172 bp, Homo sapiens
  chr22:40074986-40075158
  hypo
  myeloid_neoplasm vs. sarcoma,cervical,breast,anorectal
cggggccatctcgggggttgaatctcggtcttgctgcctccgagcgtggccctgggctggcctctgcctccagcagcctctgggatgtctccgtcctcatcctcaccgccctccctgccacgcaggacacgctgcgggactgcacccacgacgagcgcagctgcctgagcag

SEQ ID NO: 472118 - DNA, 195 bp, Homo sapiens; identical to SEQ ID NO: 356544
  chr22:40075302-40075497
  hypo
  myeloid_neoplasm vs. sarcoma,cervical,breast,anorectal

SEQ ID NO: 472119 - DNA, 106 bp, Homo sapiens; identical to SEQ ID NO: 349116
  chr22:41634855-41634961
  hypo
  myeloid_neoplasm vs. cervical,liver_bileduct,upper_gi, anorectal,ovary,uterine,breast,head_and_neck,lymphoid_neoplasm, prostate,non_cancer,lung

SEQ ID NO: 472120 - DNA, 710 bp, Homo sapiens; identical to SEQ ID NO: 344831
  chr22:46815686-46816396
  hypo
  myeloid_neoplasm vs. cervical,lung,upper_gi,anorectal, breast

SEQ ID NO: 472121 - DNA, 209 bp, Homo sapiens; identical to SEQ ID NO: 344837
  chr22:47075172-47075381
  hypo
  myeloid_neoplasm vs. melanoma,sarcoma

SEQ ID NO: 472122 - DNA, 236 bp, Homo sapiens; identical to SEQ ID NO: 344853
  chr22:48996174-48996410
  hypo
  myeloid_neoplasm vs. lymphoid_neoplasm,uterine

SEQ ID NO: 472123 - DNA, 221 bp, Homo sapiens
  chr22:49138251-49138472
  hypo
  myeloid_neoplasm vs. thyroid,non_cancer, lymphoid_neoplasm
cgggtggagcgggtggtgctgtgtggcggagctggcggcgcagtggagcgggcgttgtggtggacccggtggcgtggcagaccaggcgacgtggtggacccggccgcatggtggaccaggcaacgtggtagactgggcagcgtgatggaccaggcgacatggtggaccgggccgcatggtggaccaggcaacgtggtagaccgggccgcatggtggaccag

SEQ ID NO: 472124 - DNA, 574 bp, Homo sapiens; identical to SEQ ID NO: 356583
  chr22:49138501-49139075
  hypo
  myeloid_neoplasm vs. thyroid,non_cancer, lymphoid_neoplasm

SEQ ID NO: 472125 - DNA, 178 bp, Homo sapiens; identical to SEQ ID NO: 344859
  chr22:49698417-49698595
  hypo
  myeloid_neoplasm vs. upper_gi,lymphoid_neoplasm

SEQ ID NO: 472126 - DNA, 171 bp, Homo sapiens; identical to SEQ ID NO: 344860
  chr22:49698626-49698797
  hypo
  myeloid_neoplasm vs. thyroid

SEQ ID NO: 472127 - DNA, 298 bp, Homo sapiens; identical to SEQ ID NO: 344861
  chr22:49729101-49729399
  hypo

SEQ ID NO: 472128 - DNA, 768 bp, Homo sapiens; identical to SEQ ID NO: 356598
  chr22:50718718-50719486
  hypo
  myeloid_neoplasm vs. lymphoid_neoplasm,melanoma, colorectal,lung,liver_bileduct

SEQ ID NO: 472129 - DNA, 996 bp, Homo sapiens
  chr22:50718994-50719990
  hypo
  myeloid_neoplasm vs. lung
cgtgtagtactccagtttcccgtgcagcgccaccgtcagcagggacgcgaagtagaccttggcgcgggccgagaactcccgctggttctccagggtgtggatgaactgtaggggccggcggtcaaagcctgcccggcgccacctgtgtgccctcccgcccgcccgacgcctggctcacattgatgaggaaagacttgctgttcagcaggttggagaactggtagagggcctgctccaccaccggccgccgcggctcagggatgtccagcttgccggtgatcatcacgtccttgtcgccgtccttggagggcaggaagaagacgcggtcggtgtaggtcttgtagtccagcacggggatgccggcctcgtgcacgtcgttggtctggtcctccatctcgatcatcaggtctggggggaggctggcgtgagacgtccctggccacgtggggccctgacccccacgctacacacagcatccccgccccaggaggcgccccagcaccagcccccaagcggtccctacctgtgaattccttcttgcagcggtcccgcacgctctcctccaggccctccagctgggacttgatcttctcatactctcgttcggcctgctggctcttcctcctgcaaggcacagcgggcctcctaggttctgccggggctggccgctcagctgcccggatgaggaggtggatctacacgcctgcctgtgcagggcggcggatgaggccagaggggccgaggcgggagggccgagggctcagggtgttggcacagccggggggcgggctcaccagtagcagtagacagacaccgcgatgacgaccaccatgggcacgatgaccagcggcaagatgaggctgagcggcacgtcgctcacccgtgtgtcgtactccacgcggcccagcacccactcgcgagagccgaacttcacctgtgtggggggccgggttcagcgcggtcccgtgggggcaccccccgccagtccccgctcac

SEQ ID NO: 472130 - DNA, 153 bp, Homo sapiens; identical to SEQ ID NO: 356600
  chr22:50899708-50899861
  hypo
  myeloid_neoplasm vs. melanoma

SEQ ID NO: 472131 - DNA, 216 bp, Homo sapiens; identical to SEQ ID NO: 338027
  chr3:11578015-11578231
  hypo
  myeloid_neoplasm vs. pancreas_gallbladder

SEQ ID NO: 472132 - DNA, 546 bp, Homo sapiens; identical to SEQ ID NO: 338029
  chr3:11655438-11655984
  hypo
  myeloid_neoplasm vs. breast

SEQ ID NO: 472133 - DNA, 150 bp, Homo sapiens; identical to SEQ ID NO: 338042
  chr3:14386858-14387008
  hypo
  myeloid_neoplasm vs. uterine,renal,prostate

SEQ ID NO: 472134 - DNA, 102 bp, Homo sapiens; identical to SEQ ID NO: 338052
  chr3:18462342-18462444
  hypo
  myeloid_neoplasm vs. bladder_and_urothelial,sarcoma, melanoma,cervical,uterine,upper_gi,pancreas_gallbladder, colorectal,ovary,lung,thyroid

SEQ ID NO: 472135 - DNA, 155 bp, Homo sapiens; identical to SEQ ID NO: 338059
  chr3:30713687-30713842
  hypo
  myeloid_neoplasm vs. ovary,pancreas_gallbladder

SEQ ID NO: 472136 - DNA, 205 bp, Homo sapiens; identical to SEQ ID NO: 338076
  chr3:39185671-39185876
  hypo
  myeloid_neoplasm vs. head_and_neck,upper_gi, bladder_and_urothelial

SEQ ID NO: 472137 - DNA, 277 bp, Homo sapiens; identical to SEQ ID NO: 376771
  chr3:42905952-42906229
  hypo
  myeloid_neoplasm vs. ovary

SEQ ID NO: 472138 - DNA, 357 bp, Homo sapiens; identical to SEQ ID NO: 471200
  chr3:50374299-50374656
  hypo
  myeloid_neoplasm vs. lymphoid_neoplasm,lung, multiple_myeloma,liver_bileduct,pancreas_gallbladder,ovary, head_and_neck,colorectal,breast,bladder_and_urothelial,renal, prostate,uterine,upper_gi,non_cancer

SEQ ID NO: 472139 - DNA, 138 bp, Homo sapiens; identical to SEQ ID NO: 357614
  chr3:51990500-51990638
  hypo
  myeloid_neoplasm vs. liver_bileduct,head_and_neck, uterine,breast,melanoma

SEQ ID NO: 472140 - DNA, 466 bp, Homo sapiens; identical to SEQ ID NO: 376795
  chr3:52552661-52553127
  hypo
  myeloid_neoplasm vs. melanoma

SEQ ID NO: 472141 - DNA, 199 bp, Homo sapiens; identical to SEQ ID NO: 331773
  chr3:53195788-53195987
  hypo
  myeloid_neoplasm vs. lymphoid_neoplasm,lung, multiple_myeloma,pancreas_gallbladder,upper_gi

SEQ ID NO: 472142 - DNA, 506 bp, Homo sapiens; identical to SEQ ID NO: 338117
  chr3:54660189-54660695
  hypo
  myeloid_neoplasm vs. anorectal,head_and_neck,breast, cervical,non_cancer

SEQ ID NO: 472143 - DNA, 970 bp, Homo sapiens; identical to SEQ ID NO: 346569
  chr3:66024122-66025092
  hypo
  myeloid_neoplasm vs. ovary,upper_gi,lung, bladder_and_urothelial

SEQ ID NO: 472144 - DNA, 783 bp, Homo sapiens; identical to SEQ ID NO: 454373
  chr3:66550318-66551101
  hypo
  myeloid_neoplasm vs. upper_gi,breast,sarcoma,colorectal, prostate,cervical,pancreas_gallbladder,uterine,non_cancer, anorectal,head_and_neck,renal,lung,thyroid,ovary, bladder_and_urothelial,liver_bileduct

SEQ ID NO: 472145 - DNA, 990 bp, Homo sapiens; identical to SEQ ID NO: 454374
  chr3:66550603-66551593
  hypo
  myeloid_neoplasm vs. colorectal,upper_gi,liver_bileduct, cervical,sarcoma,breast,anorectal,prostate,uterine,non_cancer, head_and_neck,ovary,pancreas_gallbladder,renal,thyroid,lung

SEQ ID NO: 472146 - DNA, 766 bp, Homo sapiens; identical to SEQ ID NO: 454375
  chr3:66551122-66551888
  hypo
  myeloid_neoplasm vs. ovary,sarcoma,upper_gi,colorectal, cervical,anorectal,breast,head_and_neck,liver_bileduct,renal, prostate,uterine,non_cancer,lung,pancreas_gallbladder

SEQ ID NO: 472147 - DNA, 235 bp, Homo sapiens; identical to SEQ ID NO: 376843
  chr3:114070275-114070510
  hypo
  myeloid_neoplasm vs. sarcoma

SEQ ID NO: 472148 - DNA, 61 bp, Homo sapiens; identical to SEQ ID NO: 338182
  chr3:128004552-128004613
  hypo
  myeloid_neoplasm vs. sarcoma,anorectal,renal

SEQ ID NO: 472149 - DNA, 92 bp, Homo sapiens; identical to SEQ ID NO: 363348
  chr3:134080498-134080590
  hypo
  myeloid_neoplasm vs. melanoma,upper_gi,lung

SEQ ID NO: 472150 - DNA, 72 bp, Homo sapiens; identical to SEQ ID NO: 338232
  chr3:150848450-150848522
  hypo
  myeloid_neoplasm vs. sarcoma

SEQ ID NO: 472151 - DNA, 54 bp, Homo sapiens; identical to SEQ ID NO: 345815
  chr3:169540679-169540733
  hypo
  myeloid_neoplasm vs. sarcoma

SEQ ID NO: 472152 - DNA, 75 bp, Homo sapiens; identical to SEQ ID NO: 331946
  chr3:176915778-176915853
  hypo
  myeloid_neoplasm vs. multiple_myeloma

SEQ ID NO: 472153 - DNA, 114 bp, Homo sapiens; identical to SEQ ID NO: 338250
  chr3:179391556-179391670
  hypo
  myeloid_neoplasm vs. multiple_myeloma

SEQ ID NO: 472154 - DNA, 581 bp, Homo sapiens; identical to SEQ ID NO: 338253
  chr3:180546449-180547030
  hypo
  myeloid_neoplasm vs. sarcoma,lymphoid_neoplasm

SEQ ID NO: 472155 - DNA, 237 bp, Homo sapiens; identical to SEQ ID NO: 338260
  chr3:183209981-183210218
  hypo
  myeloid_neoplasm vs. renal,liver_bileduct,cervical, pancreas_gallbladder

SEQ ID NO: 472156 - DNA, 129 bp, Homo sapiens; identical to SEQ ID NO: 338283
  chr3:185365800-185365929
  hypo
  myeloid_neoplasm vs. lymphoid_neoplasm,renal

SEQ ID NO: 472157 - DNA, 477 bp, Homo sapiens; identical to SEQ ID NO: 338284
  chr3:185374988-185375465
  hypo
  myeloid_neoplasm vs. prostate,thyroid,colorectal,breast

SEQ ID NO: 472158 - DNA, 98 bp, Homo sapiens; identical to SEQ ID NO: 338286
  chr3:185441721-185441819
  hypo
  myeloid_neoplasm vs. melanoma,lymphoid_neoplasm,prostate, upper_gi,colorectal,renal,lung,non_cancer,cervical,ovary

SEQ ID NO: 472159 - DNA, 197 bp, Homo sapiens; identical to SEQ ID NO: 470593
  chr3:185445861-185446058
  hypo
  myeloid_neoplasm vs. uterine,cervical,melanoma, non_cancer,anorectal,thyroid,prostate,lymphoid_neoplasm,renal, breast,ovary

SEQ ID NO: 472160 - DNA, 15 bp, Homo sapiens
  chr3:185446094-185446109
  hypo
  myeloid_neoplasm vs. uterine,cervical,melanoma, non_cancer,anorectal,thyroid,prostate,lymphoid_neoplasm,renal, breast,ovary
tcagcgccttgactc

SEQ ID NO: 472161 - DNA, 334 bp, Homo sapiens; identical to SEQ ID NO: 338292
  chr3:187443068-187443402
  hypo
  myeloid_neoplasm vs. melanoma

SEQ ID NO: 472162 - DNA, 380 bp, Homo sapiens; identical to SEQ ID NO: 454390
  chr3:187456733-187457113
  hypo
  myeloid_neoplasm vs. multiple_myeloma

SEQ ID NO: 472163 - DNA, 522 bp, Homo sapiens; identical to SEQ ID NO: 331987
  chr3:192635635-192636157
  hypo
  myeloid_neoplasm vs. lung

SEQ ID NO: 472164 - DNA, 142 bp, Homo sapiens; identical to SEQ ID NO: 338309
  chr3:194061709-194061851
  hypo
  myeloid_neoplasm vs. lung

SEQ ID NO: 472165 - DNA, 23 bp, Homo sapiens
  chr3:194374282-194374305
  hypo
  myeloid_neoplasm vs. liver_bileduct,sarcoma
cgacggagatggaaaggtgaaca

SEQ ID NO: 472166 - DNA, 11 bp, Homo sapiens
  chr3:194374356-194374367
  hypo
  myeloid_neoplasm vs. liver_bileduct,sarcoma
tcgagggtggc

SEQ ID NO: 472167 - DNA, 410 bp, Homo sapiens; identical to SEQ ID NO: 461980
  chr4:512569-512979
  hypo
  myeloid_neoplasm vs. sarcoma,anorectal,lymphoid_neoplasm, upper_gi,melanoma,breast

SEQ ID NO: 472168 - DNA, 488 bp, Homo sapiens; identical to SEQ ID NO: 461981
  chr4:513008-513496
  hypo
  myeloid_neoplasm vs. sarcoma,anorectal,lymphoid_neoplasm, upper_gi,melanoma,breast

SEQ ID NO: 472169 - DNA, 76 bp, Homo sapiens; identical to SEQ ID NO: 338340
  chr4:529368-529444
  hypo
  myeloid_neoplasm vs. head_and_neck, bladder_and_urothelial,lymphoid_neoplasm,ovary, pancreas_gallbladder,uterine,liver_bileduct,colorectal,melanoma, breast,lung,renal

SEQ ID NO: 472170 - DNA, 32 bp, Homo sapiens; identical to SEQ ID NO: 353437
  chr4:619879-619911
  hypo
  myeloid_neoplasm vs. anorectal

SEQ ID NO: 472171 - DNA, 44 bp, Homo sapiens; identical to SEQ ID NO: 455258
  chr4:628787-628831
  hypo
  myeloid_neoplasm vs. lymphoid_neoplasm

SEQ ID NO: 472172 - DNA, 421 bp, Homo sapiens; identical to SEQ ID NO: 455259
  chr4:628950-629371
  hypo
  myeloid_neoplasm vs. lymphoid_neoplasm

SEQ ID NO: 472173 - DNA, 27 bp, Homo sapiens
  chr4:629407-629434
  hypo
  myeloid_neoplasm vs. lymphoid_neoplasm
tgggctccacgtgctcatctgcacatc

SEQ ID NO: 472174 - DNA, 126 bp, Homo sapiens; identical to SEQ ID NO: 377022
  chr4:859220-859346
  hypo
  myeloid_neoplasm vs. upper_gi,liver_bileduct

SEQ ID NO: 472175 - DNA, 306 bp, Homo sapiens; identical to SEQ ID NO: 338367
  chr4:1254365-1254671
  hypo
  myeloid_neoplasm vs. thyroid

SEQ ID NO: 472176 - DNA, 71 bp, Homo sapiens
  chr4:1282403-1282474
  hypo
  myeloid_neoplasm vs. pancreas_gallbladder, lymphoid_neoplasm,head_and_neck,bladder_and_urothelial
cggagagtggcagacacgatgcgaaccgtgaaaggacgcaaagagtacagagtgcatgcttccatctctat

SEQ ID NO: 472177 - DNA, 167 bp, Homo sapiens; identical to SEQ ID NO: 338374
  chr4:1326509-1326676
  hypo

SEQ ID NO: 472178 - DNA, 102 bp, Homo sapiens
  chr4:2460372-2460474
  hypo
  myeloid_neoplasm vs. lymphoid_neoplasm, bladder_and_urothelial
cgccctgggctggggcgggaccaggcagggaagccggagcagccccactcaccgtggcaggtccgctgtctgggcagatggccaagctgatgctgcagcgtg

SEQ ID NO: 472179 - DNA, 76 bp, Homo sapiens; identical to SEQ ID NO: 363513
  chr4:2460503-2460579
  hypo
  myeloid_neoplasm vs. lymphoid_neoplasm, bladder_and_urothelial

SEQ ID NO: 472180 - DNA, 105 bp, Homo sapiens; identical to SEQ ID NO: 363533
  chr4:3514612-3514717
  hypo
  myeloid_neoplasm vs. head_and_neck

SEQ ID NO: 472181 - DNA, 821 bp, Homo sapiens; identical to SEQ ID NO: 332029
  chr4:6271360-6272181
  hypo
  myeloid_neoplasm vs. liver_bileduct,lung,upper_gi,ovary

SEQ ID NO: 472182 - DNA, 164 bp, Homo sapiens; identical to SEQ ID NO: 363543
  chr4:6950171-6950335
  hypo
  myeloid_neoplasm vs. pancreas_gallbladder

SEQ ID NO: 472183 - DNA, 82 bp, Homo sapiens; identical to SEQ ID NO: 338448
  chr4:8386747-8386829
  hypo
  myeloid_neoplasm vs. pancreas_gallbladder

SEQ ID NO: 472184 - DNA, 167 bp, Homo sapiens; identical to SEQ ID NO: 377119
  chr4:8398721-8398888
  hypo
  myeloid_neoplasm vs. sarcoma,melanoma

SEQ ID NO: 472185 - DNA, 305 bp, Homo sapiens; identical to SEQ ID NO: 332077
  chr4:41218387-41218692
  hypo

SEQ ID NO: 472186 - DNA, 864 bp, Homo sapiens; identical to SEQ ID NO: 363573
  chr4:57179991-57180855
  hypo
  myeloid_neoplasm vs. renal

SEQ ID NO: 472187 - DNA, 27 bp, Homo sapiens
  chr4:81307585-81307612
  hypo
  myeloid_neoplasm vs. cervical,renal
cgggtcaggcaagggggtcaccacctt

SEQ ID NO: 472188 - DNA, 1 bp, Homo sapiens
  chr4:100867923-100867924
  hypo
  myeloid_neoplasm vs. lymphoid_neoplasm,lung, head_and_neck,pancreas_gallbladder,upper_gi,colorectal, multiple_myeloma,prostate,liver_bileduct,renal, bladder_and_urothelial,ovary,sarcoma,melanoma,non_cancer,breast,
  CONT. FROM ABOVE: uterine,cervical,thyroid,anorectal
c

SEQ ID NO: 472189 - DNA, 258 bp, Homo sapiens; identical to SEQ ID NO: 345138
  chr4:100867945-100868203
  hypo
  myeloid_neoplasm vs. lymphoid_neoplasm,lung, head_and_neck,pancreas_gallbladder,upper_gi,colorectal, multiple_myeloma,prostate,liver_bileduct,renal, bladder_and_urothelial,ovary,sarcoma,melanoma,non_cancer,breast,
  CONT. FROM ABOVE: uterine,cervical,thyroid,anorectal

SEQ ID NO: 472190 - DNA, 702 bp, Homo sapiens; identical to SEQ ID NO: 471242
  chr4:106156138-106156840
  hypo
  myeloid_neoplasm vs. bladder_and_urothelial

SEQ ID NO: 472191 - DNA, 971 bp, Homo sapiens; identical to SEQ ID NO: 357933
  chr4:106156519-106157490
  hypo
  myeloid_neoplasm vs. bladder_and_urothelial,sarcoma

SEQ ID NO: 472192 - DNA, 281 bp, Homo sapiens; identical to SEQ ID NO: 338537
  chr4:123300379-123300660
  hypo
  myeloid_neoplasm vs. ovary,lung,upper_gi, lymphoid_neoplasm

SEQ ID NO: 472193 - DNA, 83 bp, Homo sapiens
  chr4:141207770-141207853
  hypo
  myeloid_neoplasm vs. pancreas_gallbladder
cggcatgtgcagccgtgtgcccgcgccgttcctcacgtgcacatgggtggcttgagcgcataagcatgactgccaatatcacg

SEQ ID NO: 472194 - DNA, 26 bp, Homo sapiens
  chr4:141207918-141207944
  hypo
  myeloid_neoplasm vs. pancreas_gallbladder
ctgtcaaggacgactgtgggagtcac

SEQ ID NO: 472195 - DNA, 923 bp, Homo sapiens; identical to SEQ ID NO: 348054
  chr4:141564347-141565270
  hypo
  myeloid_neoplasm vs. renal,anorectal, bladder_and_urothelial,prostate,melanoma,head_and_neck,uterine, ovary,cervical,upper_gi,non_cancer,lung,lymphoid_neoplasm, colorectal,thyroid,pancreas_gallbladder,liver_bileduct

SEQ ID NO: 472196 - DNA, 224 bp, Homo sapiens; identical to SEQ ID NO: 471245
  chr4:149364661-149364885
  hypo
  myeloid_neoplasm vs. ovary,colorectal,cervical,upper_gi, non_cancer,uterine,head_and_neck,lung,pancreas_gallbladder, breast,prostate,renal

SEQ ID NO: 472197 - DNA, 346 bp, Homo sapiens; identical to SEQ ID NO: 357982
  chr4:149365911-149366257
  hypo
  myeloid_neoplasm vs. ovary

SEQ ID NO: 472198 - DNA, 17 bp, Homo sapiens
  chr4:154216357-154216374
  hypo
  myeloid_neoplasm vs. thyroid
acctgcgtgggcaggtg

SEQ ID NO: 472199 - DNA, 352 bp, Homo sapiens; identical to SEQ ID NO: 209824
  chr4:154216898-154217250
  hypo
  myeloid_neoplasm vs. thyroid

SEQ ID NO: 472200 - DNA, 220 bp, Homo sapiens; identical to SEQ ID NO: 471252
  chr4:185939454-185939674
  hypo
  myeloid_neoplasm vs. lung,upper_gi,head_and_neck

SEQ ID NO: 472201 - DNA, 346 bp, Homo sapiens; identical to SEQ ID NO: 338579
  chr4:188427955-188428301
  hypo
  myeloid_neoplasm vs. head_and_neck,anorectal,sarcoma, renal,thyroid

SEQ ID NO: 472202 - DNA, 482 bp, Homo sapiens; identical to SEQ ID NO: 338580
  chr4:189552385-189552867
  hypo
  myeloid_neoplasm vs. thyroid,head_and_neck

SEQ ID NO: 472203 - DNA, 702 bp, Homo sapiens; identical to SEQ ID NO: 338583
  chr4:190462487-190463189
  hypo
  myeloid_neoplasm vs. thyroid

SEQ ID NO: 472204 - DNA, 240 bp, Homo sapiens; identical to SEQ ID NO: 338584
  chr5:110225-110465
  hypo
  myeloid_neoplasm vs. breast,uterine,prostate,ovary, non_cancer,head_and_neck,colorectal

SEQ ID NO: 472205 - DNA, 8 bp, Homo sapiens
  chr5:429668-429676
  hypo
  myeloid_neoplasm vs. thyroid
cgagaccc

SEQ ID NO: 472206 - DNA, 173 bp, Homo sapiens; identical to SEQ ID NO: 338590
  chr5:462216-462389
  hypo
  myeloid_neoplasm vs. colorectal,melanoma

SEQ ID NO: 472207 - DNA, 740 bp, Homo sapiens
  chr5:465064-465804
  hypo
  myeloid_neoplasm vs. ovary,sarcoma,melanoma, liver_bileduct,colorectal,breast,head_and_neck,lung,anorectal, pancreas_gallbladder,upper_gi,cervical
cgctcctcctctgcggtgagatgccagagccgtggcggagcgaggaggagtgggctcagagcctccggggagccaccgggagccccagcctgggtttcaatgagggtgctcctggccgccagagccgtggagcctgccgctgaccgcgcgtgtctccccagaggatgacggccgaggcgcaccggcgcgtggtggtggagtacctgcgggcggtcatgcagaagcgcatttccttccggagcccggaggagcgcaaggagggtgccgagaagatggttagggaggcagagcagctgcgcttcctgttccggaagctggcgtccgtgagtgtcgcgcaggtccgggctggagaaggcctgtcgctccgcggccctgttcagcctccaccccgggactcgggccagtagatgggagtgtgtcgtgtgtttgtcaggcggggggagcctgggtccaggtcctgcctgaccttgtggttggacacgaatgtccacagaggtagacgcgccggccccgccggcttcccgaggccgcccacagctccctgacggacgcttcccagtctgtcctgcgctgcgaggtgctggctgcctcccacggtctcgccctcaccccagacccctggccctgtcactgagctttcagagtagatcctgaggagtcaggtgaagagggaggttcccagtcaggaaggggctcagccagaatccagctgctcccagcgccgcgggacagccgagggc

SEQ ID NO: 472208 - DNA, 201 bp, Homo sapiens; identical to SEQ ID NO: 353537
  chr5:520018-520219
  hypo
  myeloid_neoplasm vs. thyroid,cervical

SEQ ID NO: 472209 - DNA, 259 bp, Homo sapiens; identical to SEQ ID NO: 471253
  chr5:676510-676769
  hypo
  myeloid_neoplasm vs. cervical,prostate,lymphoid_neoplasm, renal,pancreas_gallbladder,colorectal,non_cancer,liver_bileduct

SEQ ID NO: 472210 - DNA, 356 bp, Homo sapiens; identical to SEQ ID NO: 350028
  chr5:676926-677282
  hypo
  myeloid_neoplasm vs. cervical,prostate,lymphoid_neoplasm, renal,pancreas_gallbladder,colorectal,non_cancer,liver_bileduct

SEQ ID NO: 472211 - DNA, 343 bp, Homo sapiens; identical to SEQ ID NO: 338655
  chr5:1409813-1410156
  hypo
  myeloid_neoplasm vs. anorectal

SEQ ID NO: 472212 - DNA, 254 bp, Homo sapiens; identical to SEQ ID NO: 338657
  chr5:1551543-1551797
  hypo
  myeloid_neoplasm vs. colorectal

SEQ ID NO: 472213 - DNA, 327 bp, Homo sapiens; identical to SEQ ID NO: 338658
  chr5:1553050-1553377
  hypo
  myeloid_neoplasm vs. upper_gi,melanoma, bladder_and_urothelial,pancreas_gallbladder

SEQ ID NO: 472214 - DNA, 185 bp, Homo sapiens; identical to SEQ ID NO: 338665
  chr5:1808331-1808516
  hypo
  myeloid_neoplasm vs. sarcoma,renal,cervical,ovary, pancreas_gallbladder,breast,non_cancer,prostate,colorectal

SEQ ID NO: 472215 - DNA, 625 bp, Homo sapiens; identical to SEQ ID NO: 353582
  chr5:1809065-1809690
  hypo
  myeloid_neoplasm vs. thyroid,sarcoma,lymphoid_neoplasm, breast,prostate,liver_bileduct

SEQ ID NO: 472216 - DNA, 75 bp, Homo sapiens; identical to SEQ ID NO: 363735
  chr5:3454429-3454504
  hypo
  myeloid_neoplasm vs. anorectal,thyroid

SEQ ID NO: 472217 - DNA, 114 bp, Homo sapiens; identical to SEQ ID NO: 463790
  chr5:3740590-3740704
  hypo
  myeloid_neoplasm vs. cervical,lymphoid_neoplasm

SEQ ID NO: 472218 - DNA, 22 bp, Homo sapiens
  chr5:3741017-3741039
  hypo
  myeloid_neoplasm vs. cervical,lymphoid_neoplasm
gacccaccccagcgtgcctacc

SEQ ID NO: 472219 - DNA, 328 bp, Homo sapiens; identical to SEQ ID NO: 463792
  chr5:3761240-3761568
  hypo
  myeloid_neoplasm vs. anorectal,renal,non_cancer, head_and_neck

SEQ ID NO: 472220 - DNA, 301 bp, Homo sapiens; identical to SEQ ID NO: 353596
  chr5:3761623-3761924
  hypo
  myeloid_neoplasm vs. anorectal,renal,non_cancer, head_and_neck

SEQ ID NO: 472221 - DNA, 208 bp, Homo sapiens; identical to SEQ ID NO: 353598
  chr5:3932149-3932357
  hypo
  myeloid_neoplasm vs. lymphoid_neoplasm,thyroid

SEQ ID NO: 472222 - DNA, 383 bp, Homo sapiens; identical to SEQ ID NO: 470677
  chr5:9122712-9123095
  hypo
  myeloid_neoplasm vs. sarcoma

SEQ ID NO: 472223 - DNA, 359 bp, Homo sapiens; identical to SEQ ID NO: 338703
  chr5:12794972-12795331
  hypo
  myeloid_neoplasm vs. head_and_neck,anorectal,thyroid, renal,colorectal,lymphoid_neoplasm,non_cancer, pancreas_gallbladder,breast,upper_gi,prostate

SEQ ID NO: 472224 - DNA, 259 bp, Homo sapiens; identical to SEQ ID NO: 338707
  chr5:14461130-14461389
  hypo
  myeloid_neoplasm vs. lung,ovary,lymphoid_neoplasm, liver_bileduct

SEQ ID NO: 472225 - DNA, 157 bp, Homo sapiens; identical to SEQ ID NO: 363752
  chr5:14492755-14492912
  hypo
  myeloid_neoplasm vs. liver_bileduct

SEQ ID NO: 472226 - DNA, 217 bp, Homo sapiens
  chr5:17275369-17275586
  hypo
  myeloid_neoplasm vs. cervical
cgacgagaaagccaaggagaaagacaagaaggccgagggcgcggcgacggaagaggaggggaccccgaaggagagtgagccccaggcggccgcagagcccgccgaggccaaggagggcaaggagaagcccgaccaggacgccgagggcaaggccgaggagaaggagggcgagaaggacgcggcggctgccaaggaggaggccccgaaggcggagccc

SEQ ID NO: 472227 - DNA, 380 bp, Homo sapiens; identical to SEQ ID NO: 363760
  chr5:17275617-17275997
  hypo
  myeloid_neoplasm vs. cervical

SEQ ID NO: 472228 - DNA, 337 bp, Homo sapiens; identical to SEQ ID NO: 338716
  chr5:17354400-17354737
  hypo
  myeloid_neoplasm vs. sarcoma

SEQ ID NO: 472229 - DNA, 64 bp, Homo sapiens; identical to SEQ ID NO: 338739
  chr5:73205673-73205737
  hypo
  myeloid_neoplasm vs. melanoma

SEQ ID NO: 472230 - DNA, 164 bp, Homo sapiens; identical to SEQ ID NO: 332389
  chr5:73843900-73844064
  hypo
  myeloid_neoplasm vs. sarcoma,anorectal, bladder_and_urothelial

SEQ ID NO: 472231 - DNA, 181 bp, Homo sapiens; identical to SEQ ID NO: 338741
  chr5:73932104-73932285
  hypo
  myeloid_neoplasm vs. multiple_myeloma

SEQ ID NO: 472232 - DNA, 145 bp, Homo sapiens; identical to SEQ ID NO: 338802
  chr5:135188298-135188443
  hypo
  myeloid_neoplasm vs. thyroid,uterine

SEQ ID NO: 472233 - DNA, 102 bp, Homo sapiens; identical to SEQ ID NO: 338804
  chr5:136983271-136983373
  hypo
  myeloid_neoplasm vs. pancreas_gallbladder,colorectal, upper_gi,sarcoma

SEQ ID NO: 472234 - DNA, 87 bp, Homo sapiens; identical to SEQ ID NO: 332540
  chr5:148724812-148724899
  hypo
  myeloid_neoplasm vs. liver_bileduct,head_and_neck,ovary, lung,colorectal,multiple_myeloma,breast,prostate,melanoma,renal, non_cancer,lymphoid_neoplasm,upper_gi,thyroid,anorectal, bladder_and_urothelial,pancreas_gallbladder

SEQ ID NO: 472235 - DNA, 42 bp, Homo sapiens
  chr5:150911164-150911206
  hypo
  myeloid_neoplasm vs. anorectal,breast,melanoma, head_and_neck
cggaacctgccttgctcgttcccgctgaccacgcggtagccg

SEQ ID NO: 472236 - DNA, 135 bp, Homo sapiens; identical to SEQ ID NO: 338834
  chr5:158139227-158139362
  hypo
  myeloid_neoplasm vs. lymphoid_neoplasm

SEQ ID NO: 472237 - DNA, 398 bp, Homo sapiens; identical to SEQ ID NO: 338842
  chr5:159707402-159707800
  hypo
  myeloid_neoplasm vs. renal

SEQ ID NO: 472238 - DNA, 129 bp, Homo sapiens; identical to SEQ ID NO: 348113
  chr5:168195266-168195395
  hypo
  myeloid_neoplasm vs. thyroid,uterine,non_cancer,prostate, cervical,head_and_neck,colorectal,anorectal,renal

SEQ ID NO: 472239 - DNA, 50 bp, Homo sapiens; identical to SEQ ID NO: 353685
  chr5:171724013-171724063
  hypo
  myeloid_neoplasm vs. melanoma,anorectal,breast,uterine, ovary,lung,sarcoma

SEQ ID NO: 472240 - DNA, 123 bp, Homo sapiens; identical to SEQ ID NO: 377520
  chr5:171859485-171859608
  hypo
  myeloid_neoplasm vs. liver_bileduct

SEQ ID NO: 472241 - DNA, 306 bp, Homo sapiens; identical to SEQ ID NO: 338859
  chr5:171916875-171917181
  hypo
  myeloid_neoplasm vs. upper_gi,sarcoma,colorectal, pancreas_gallbladder,cervical,ovary

SEQ ID NO: 472242 - DNA, 249 bp, Homo sapiens; identical to SEQ ID NO: 471271
  chr5:176560001-176560250
  hypo
  myeloid_neoplasm vs. anorectal,cervical,thyroid, non_cancer,multiple_myeloma,bladder_and_urothelial,uterine, breast

SEQ ID NO: 472243 - DNA, 290 bp, Homo sapiens; identical to SEQ ID NO: 345203
  chr5:176560318-176560608
  hypo
  myeloid_neoplasm vs. anorectal,cervical,thyroid, non_cancer,multiple_myeloma,bladder_and_urothelial,uterine, breast

SEQ ID NO: 472244 - DNA, 143 bp, Homo sapiens; identical to SEQ ID NO: 338899
  chr5:178259527-178259670
  hypo
  myeloid_neoplasm vs. thyroid,anorectal

SEQ ID NO: 472245 - DNA, 113 bp, Homo sapiens
  chr5:178580401-178580514
  hypo
  myeloid_neoplasm vs. sarcoma,thyroid,renal
cggtcctcacactgtcccgggagctgcccctacaccagcacgcctccccccagacctgggagggtcccggctgcagggctgcacactcaccgccgtgcacatcatgtagccca

SEQ ID NO: 472246 - DNA, 118 bp, Homo sapiens; identical to SEQ ID NO: 353708
  chr5:178580543-178580661
  hypo
  myeloid_neoplasm vs. sarcoma,thyroid,renal

SEQ ID NO: 472247 - DNA, 29 bp, Homo sapiens
  chr5:179401697-179401726
  hypo
  myeloid_neoplasm vs. cervical,breast, bladder_and_urothelial,uterine,prostate
cgatggctttgaaagagagttttaaaaac

SEQ ID NO: 472248 - DNA, 422 bp, Homo sapiens; identical to SEQ ID NO: 353712
  chr5:179401775-179402197
  hypo
  myeloid_neoplasm vs. cervical,breast, bladder_and_urothelial,uterine,prostate

SEQ ID NO: 472249 - DNA, 137 bp, Homo sapiens; identical to SEQ ID NO: 363928
  chr5:179546922-179547059
  hypo
  myeloid_neoplasm vs. lymphoid_neoplasm,renal

SEQ ID NO: 472250 - DNA, 149 bp, Homo sapiens; identical to SEQ ID NO: 363929
  chr5:179564196-179564345
  hypo
  myeloid_neoplasm vs. cervical,uterine,sarcoma,ovary

SEQ ID NO: 472251 - DNA, 120 bp, Homo sapiens; identical to SEQ ID NO: 338926
  chr6:550612-550732
  hypo
  myeloid_neoplasm vs. liver_bileduct

SEQ ID NO: 472252 - DNA, 139 bp, Homo sapiens
  chr6:1515515-1515654
  hypo
  myeloid_neoplasm vs. melanoma
cgttgccacgttcatcccggggctggagctgctgcttcacactgacttacacggtgagcagcggcggcaggggaggaggtggaacccgcggcgagctgctgcttcacactgacttacaccgtgagcagcggcggcaggg

SEQ ID NO: 472253 - DNA, 123 bp, Homo sapiens; identical to SEQ ID NO: 377596
  chr6:1515702-1515825
  hypo
  myeloid_neoplasm vs. melanoma

SEQ ID NO: 472254 - DNA, 87 bp, Homo sapiens; identical to SEQ ID NO: 338950
  chr6:3734377-3734464
  hypo
  myeloid_neoplasm vs. cervical,breast

SEQ ID NO: 472255 - DNA, 210 bp, Homo sapiens; identical to SEQ ID NO: 338952
  chr6:3880057-3880267
  hypo
  myeloid_neoplasm vs. head_and_neck

SEQ ID NO: 472256 - DNA, 194 bp, Homo sapiens; identical to SEQ ID NO: 338970
  chr6:7247353-7247547
  hypo
  myeloid_neoplasm vs. lymphoid_neoplasm,lung

SEQ ID NO: 472257 - DNA, 144 bp, Homo sapiens; identical to SEQ ID NO: 338987
  chr6:13386531-13386675
  hypo
  myeloid_neoplasm vs. liver_bileduct

SEQ ID NO: 472258 - DNA, 235 bp, Homo sapiens; identical to SEQ ID NO: 338995
  chr6:18368676-18368911
  hypo
  myeloid_neoplasm vs. head_and_neck,prostate,thyroid, melanoma

SEQ ID NO: 472259 - DNA, 177 bp, Homo sapiens; identical to SEQ ID NO: 377665
  chr6:21602337-21602514
  hypo
  myeloid_neoplasm vs. cervical,lung

SEQ ID NO: 472260 - DNA, 49 bp, Homo sapiens; identical to SEQ ID NO: 364014
  chr6:36214794-36214843
  hypo
  myeloid_neoplasm vs. uterine,prostate

SEQ ID NO: 472261 - DNA, 219 bp, Homo sapiens; identical to SEQ ID NO: 339037
  chr6:38118812-38119031
  hypo
  myeloid_neoplasm vs. colorectal,ovary

SEQ ID NO: 472262 - DNA, 4 bp, Homo sapiens
  chr6:40360214-40360218
  hypo
  myeloid_neoplasm vs. lymphoid_neoplasm,colorectal
cggt

SEQ ID NO: 472263 - DNA, 291 bp, Homo sapiens; identical to SEQ ID NO: 364031
  chr6:40360252-40360543
  hypo
  myeloid_neoplasm vs. lymphoid_neoplasm,colorectal

SEQ ID NO: 472264 - DNA, 236 bp, Homo sapiens; identical to SEQ ID NO: 339054
  chr6:43096747-43096983
  hypo
  myeloid_neoplasm vs. ovary,pancreas_gallbladder,sarcoma

SEQ ID NO: 472265 - DNA, 177 bp, Homo sapiens; identical to SEQ ID NO: 471281
  chr6:44044201-44044378
  hypo
  myeloid_neoplasm vs. multiple_myeloma,uterine,upper_gi, colorectal,non_cancer,breast,renal

SEQ ID NO: 472266 - DNA, 97 bp, Homo sapiens; identical to SEQ ID NO: 346817
  chr6:44044450-44044547
  hypo
  myeloid_neoplasm vs. multiple_myeloma,uterine,upper_gi, colorectal,non_cancer,breast,renal

SEQ ID NO: 472267 - DNA, 39 bp, Homo sapiens; identical to SEQ ID NO: 471284
  chr6:45631098-45631137
  hypo
  myeloid_neoplasm vs. multiple_myeloma,non_cancer

SEQ ID NO: 472268 - DNA, 22 bp, Homo sapiens
  chr6:45631602-45631624
  hypo
  myeloid_neoplasm vs. multiple_myeloma,non_cancer
cgtttcagcgtgaaacagaccc

SEQ ID NO: 472269 - DNA, 13 bp, Homo sapiens
  chr6:64150651-64150664
  hypo
  myeloid_neoplasm vs. thyroid
cgttcagccgacc

SEQ ID NO: 472270 - DNA, 31 bp, Homo sapiens
  chr6:64150818-64150849
  hypo
  myeloid_neoplasm vs. thyroid
aatgactattgtgccgggcacggtggctcac

SEQ ID NO: 472271 - DNA, 192 bp, Homo sapiens; identical to SEQ ID NO: 339088
  chr6:74079530-74079722
  hypo
  myeloid_neoplasm vs. head_and_neck

SEQ ID NO: 472272 - DNA, 36 bp, Homo sapiens
  chr6:105750354-105750390
  hypo
  myeloid_neoplasm vs. head_and_neck,anorectal,ovary, colorectal
cgggtacggccgctccttccgcggctgctgcttggt

SEQ ID NO: 472273 - DNA, 83 bp, Homo sapiens; identical to SEQ ID NO: 364086
  chr6:105750646-105750729
  hypo
  myeloid_neoplasm vs. head_and_neck,anorectal,ovary, colorectal

SEQ ID NO: 472274 - DNA, 66 bp, Homo sapiens; identical to SEQ ID NO: 339122
  chr6:112021634-112021700
  hypo
  myeloid_neoplasm vs. upper_gi,anorectal,renal, pancreas_gallbladder,colorectal,melanoma,breast

SEQ ID NO: 472275 - DNA, 74 bp, Homo sapiens; identical to SEQ ID NO: 462054
  chr6:119510833-119510907
  hypo
  myeloid_neoplasm vs. lymphoid_neoplasm,colorectal, prostate,non_cancer,uterine,thyroid,renal,breast,cervical

SEQ ID NO: 472276 - DNA, 70 bp, Homo sapiens; identical to SEQ ID NO: 353822
  chr6:119510942-119511012
  hypo
  myeloid_neoplasm vs. lymphoid_neoplasm,colorectal, prostate,non_cancer,uterine,thyroid,renal,breast,cervical

SEQ ID NO: 472277 - DNA, 429 bp, Homo sapiens; identical to SEQ ID NO: 457077
  chr6:128901277-128901706
  hypo
  myeloid_neoplasm vs. bladder_and_urothelial,anorectal, cervical,colorectal,uterine,renal,prostate,lymphoid_neoplasm, non_cancer,thyroid,upper_gi,lung

SEQ ID NO: 472278 - DNA, 97 bp, Homo sapiens; identical to SEQ ID NO: 339138
  chr6:136980882-136980979
  hypo
  myeloid_neoplasm vs. melanoma,colorectal,breast, bladder_and_urothelial,renal

SEQ ID NO: 472279 - DNA, 462 bp, Homo sapiens; identical to SEQ ID NO: 339146
  chr6:150654152-150654614
  hypo
  myeloid_neoplasm vs. breast,uterine

SEQ ID NO: 472280 - DNA, 752 bp, Homo sapiens; identical to SEQ ID NO: 332955
  chr6:150921277-150922029
  hypo
  myeloid_neoplasm vs. lymphoid_neoplasm,upper_gi

SEQ ID NO: 472281 - DNA, 256 bp, Homo sapiens; identical to SEQ ID NO: 339150
  chr6:151687263-151687519
  hypo
  myeloid_neoplasm vs. upper_gi,melanoma,lung,ovary,breast

SEQ ID NO: 472282 - DNA, 96 bp, Homo sapiens; identical to SEQ ID NO: 339151
  chr6:152527379-152527475
  hypo
  myeloid_neoplasm vs. liver_bileduct,lymphoid_neoplasm

SEQ ID NO: 472283 - DNA, 254 bp, Homo sapiens
  chr6:157502185-157502439
  hypo
  myeloid_neoplasm vs. lymphoid_neoplasm,renal,uterine
cgaccgatacctcaccttcatggaagagagaggctctcctgtctcaagtctgcctgccgtgggcaagaagcccctggacctgttccgactctacgtctgcgtcaaagagatcgggggtttggcccaggtaagaatgagtgagggagggggtgaaaaaggaagcattgtggataagttcttacagtggctttctttgaatgtgtggactcattttttttctcacaaaggaaaagctaagcctgtgtgaaagtcgc

SEQ ID NO: 472284 - DNA, 195 bp, Homo sapiens; identical to SEQ ID NO: 339179
  chr6:160452681-160452876
  hypo
  myeloid_neoplasm vs. breast

SEQ ID NO: 472285 - DNA, 116 bp, Homo sapiens; identical to SEQ ID NO: 377847
  chr6:164441373-164441489
  hypo
  myeloid_neoplasm vs. lymphoid_neoplasm,anorectal

SEQ ID NO: 472286 - DNA, 969 bp, Homo sapiens
  chr6:167314769-167315738
  hypo
  myeloid_neoplasm vs. multiple_myeloma,lung,melanoma
cgggtgaacacacagaggggagagctccgtgtgaacacaaagggaggagaacgcctggtgagcacacacggggagagaacaccgcgcggacccacaagggggagaatgcctggtgaacgtacagcgggaggggagaacgctggtgaacgcacagcggggaaaacgccatgtgaacgcacaaaggaaggagaacgccaggtgaactcatacagggggtaggaacgccagaggaaagcacacagtaaagagaaggccgtgggaacgcgcaggggagagaacgccgggagaacacagagggaggaaaatgccaggtgaacgcacaagggggaaaacgcctggtgaacgcacaaaggagaaagccaggtgaacgcacaagcagcagaacgccaagtgaacgcacgaggggagaatgctgcgccaacacacacgggaaacacaaccgcgcgagcacgcagtggggagaacggcacgcgaacgctcagcaagaagaacgtaagttgaacggacagcggggagaacgccgccctaacacacgcgggaaataacgacgcgtgaacacacagcagggagaacgccgcgtgaaagcacaggggggagaacgccgcgtgaatgcacacacgggaaataacgccgtgtgaacacacagcggggagaacgccgcgtgaacgcacacaggggaaataacgccgcgcgaacacacagggggaagaacgtcacagggacgcacagtggggaaacgccatgtgaacgcacaaagaaagaacgccacgtgaactcgcacacgcggggagaacgccggggaaacgcacacagtaaagagaacgcagtttgaacgcacaggggagagaacgccacgtgaacacacagaagggagaatgcagtgcgaacacacagaagggagaacacctggtgaaggcacagaggggagaacgccgagcgaacgcacagggtggagaatgccatgtgaac

SEQ ID NO: 472287 - DNA, 809 bp, Homo sapiens; identical to SEQ ID NO: 353856
  chr6:167315260-167316069
  hypo
  myeloid_neoplasm vs. multiple_myeloma,breast, bladder_and_urothelial

SEQ ID NO: 472288 - DNA, 233 bp, Homo sapiens; identical to SEQ ID NO: 339201
  chr6:168137821-168138054
  hypo
  myeloid_neoplasm vs. melanoma,uterine,breast,non_cancer, prostate,thyroid

SEQ ID NO: 472289 - DNA, 314 bp, Homo sapiens; identical to SEQ ID NO: 339208
  chr6:169641077-169641391
  hypo
  myeloid_neoplasm vs. cervical

SEQ ID NO: 472290 - DNA, 678 bp, Homo sapiens; identical to SEQ ID NO: 377869
  chr6:170454200-170454878
  hypo
  myeloid_neoplasm vs. prostate,colorectal

SEQ ID NO: 472291 - DNA, 6 bp, Homo sapiens
  chr7:328241-328247
  hypo
  myeloid_neoplasm vs. cervical
cgctgg

SEQ ID NO: 472292 - DNA, 302 bp, Homo sapiens; identical to SEQ ID NO: 353873
  chr7:455133-455435
  hypo
  myeloid_neoplasm vs. uterine,thyroid,lymphoid_neoplasm, head_and_neck,ovary,sarcoma,non_cancer,breast,prostate,renal, upper_gi,lung,cervical

SEQ ID NO: 472293 - DNA, 291 bp, Homo sapiens; identical to SEQ ID NO: 339242
  chr7:479019-479310
  hypo
  myeloid_neoplasm vs. breast,prostate

SEQ ID NO: 472294 - DNA, 504 bp, Homo sapiens; identical to SEQ ID NO: 364199
  chr7:503100-503604
  hypo
  myeloid_neoplasm vs. melanoma,uterine,prostate

SEQ ID NO: 472295 - DNA, 538 bp, Homo sapiens
  chr7:503139-503677
  hypo
  myeloid_neoplasm vs. melanoma
cgccaggcccagcactctgctcttcccgctcacccactcggccgggcctgtgccctcccgcccggccaagtgggggctccaggaagggcagcgagtgccccgcggccccggccccactgcgggcggccggaacacagagggcggtgaggaaggaggcgttccctgccgggtgccctccagcaggattcgcgaacccaggggagcgagcgggaggattttccatgtgaggccggcttcctggggcgaggcccacccggcgccagcgtggagagaggagaggagcaaagcgcctcgacacattctccctcggtgatttaatggccggagcattcgtgcgatatttatgcagtaaatccttccactggggggtttcactgtgtcacgggaggctcctcccagcccgtccccatcccgtcccccccaaaaaaagaatcctgagaaaatctcatttcacagtttcccatcgagccaggtgcacagcagctgcggtgggcatggcgggcgcgggtcctggggaacaccctctgctggcgtccgc

SEQ ID NO: 472296 - DNA, 295 bp, Homo sapiens; identical to SEQ ID NO: 471296
  chr7:557697-557992
  hypo
  myeloid_neoplasm vs. ovary,lung,uterine,liver_bileduct

SEQ ID NO: 472297 - DNA, 252 bp, Homo sapiens; identical to SEQ ID NO: 339255
  chr7:716729-716981
  hypo
  myeloid_neoplasm vs. upper_gi,lymphoid_neoplasm, colorectal,melanoma

SEQ ID NO: 472298 - DNA, 90 bp, Homo sapiens; identical to SEQ ID NO: 72679
  chr7:778947-779037
  hypo
  myeloid_neoplasm vs. sarcoma

SEQ ID NO: 472299 - DNA, 37 bp, Homo sapiens
  chr7:803211-803248
  hypo
  myeloid_neoplasm vs. liver_bileduct
cgctgcagagacggcgttggtgtgaacgggatcaggg

SEQ ID NO: 472300 - DNA, 222 bp, Homo sapiens; identical to SEQ ID NO: 377926
  chr7:803615-803837
  hypo
  myeloid_neoplasm vs. liver_bileduct

SEQ ID NO: 472301 - DNA, 238 bp, Homo sapiens; identical to SEQ ID NO: 332992
  chr7:822395-822633
  hypo
  myeloid_neoplasm vs. cervical,head_and_neck,sarcoma

SEQ ID NO: 472302 - DNA, 333 bp, Homo sapiens; identical to SEQ ID NO: 332995
  chr7:1001822-1002155
  hypo
  myeloid_neoplasm vs. head_and_neck

SEQ ID NO: 472303 - DNA, 177 bp, Homo sapiens; identical to SEQ ID NO: 339275
  chr7:1075890-1076067
  hypo
  myeloid_neoplasm vs. sarcoma

SEQ ID NO: 472304 - DNA, 13 bp, Homo sapiens
  chr7:1735052-1735065
  hypo
  myeloid_neoplasm vs. renal,sarcoma
gcagactcagccc

SEQ ID NO: 472305 - DNA, 234 bp, Homo sapiens
  chr7:1784457-1784691
  hypo
cagtacgcctcgctcagccgctttggcaacctcacgtacctcaacctcaccaagaacgagatcggctacatcgaggacggcgccttctcgggccagttcaacctgcaggtgctgcagctgggctacaaccggctgcgcaacctcacggagggcatgctgcgcggcctgggcaagctggagtacctgtacctgcaggccaacctcatcgaggtggtcatggccagcagcttctgg

SEQ ID NO: 472306 - DNA, 370 bp, Homo sapiens; identical to SEQ ID NO: 377977
  chr7:1784927-1785297
  hypo

SEQ ID NO: 472307 - DNA, 392 bp, Homo sapiens; identical to SEQ ID NO: 339338
  chr7:2298049-2298441
  hypo
  myeloid_neoplasm vs. liver_bileduct

SEQ ID NO: 472308 - DNA, 469 bp, Homo sapiens; identical to SEQ ID NO: 457098
  chr7:2472811-2473280
  hypo
  myeloid_neoplasm vs. anorectal

SEQ ID NO: 472309 - DNA, 60 bp, Homo sapiens; identical to SEQ ID NO: 457099
  chr7:2473220-2473280
  hypo
  myeloid_neoplasm vs. renal,anorectal

SEQ ID NO: 472310 - DNA, 328 bp, Homo sapiens; identical to SEQ ID NO: 345896
  chr7:2473779-2474107
  hypo
  myeloid_neoplasm vs. renal,anorectal

SEQ ID NO: 472311 - DNA, 74 bp, Homo sapiens; identical to SEQ ID NO: 339354
  chr7:3211469-3211543
  hypo
  myeloid_neoplasm vs. cervical

SEQ ID NO: 472312 - DNA, 123 bp, Homo sapiens; identical to SEQ ID NO: 339361
  chr7:4254687-4254810
  hypo
  myeloid_neoplasm vs. cervical

SEQ ID NO: 472313 - DNA, 527 bp, Homo sapiens; identical to SEQ ID NO: 353922
  chr7:4917102-4917629
  hypo
  myeloid_neoplasm vs. cervical

SEQ ID NO: 472314 - DNA, 8 bp, Homo sapiens
  chr7:6560401-6560409
  hypo
  myeloid_neoplasm vs. sarcoma
ccacaggc

SEQ ID NO: 472315 - DNA, 162 bp, Homo sapiens; identical to SEQ ID NO: 339401
  chr7:6694972-6695134
  hypo
  myeloid_neoplasm vs. liver_bileduct,head_and_neck, upper_gi,lymphoid_neoplasm,renal,pancreas_gallbladder, bladder_and_urothelial,sarcoma,lung,colorectal,breast, non_cancer,prostate,anorectal,multiple_myeloma,uterine,ovary

SEQ ID NO: 472316 - DNA, 134 bp, Homo sapiens
  chr7:23749573-23749707
  hypo
  myeloid_neoplasm vs. sarcoma
cgtgaacagattaggaaagaccacgaaatcctacgtcacctctaaagtcacagcttgaagccttgcgaaaggaactggccctagaccccaccccggcctataaatcaccagggcgcagcctcagtgcctggggg

SEQ ID NO: 472317 - DNA, 364 bp, Homo sapiens; identical to SEQ ID NO: 353951
  chr7:23749829-23750193
  hypo
  myeloid_neoplasm vs. sarcoma

SEQ ID NO: 472318 - DNA, 272 bp, Homo sapiens
  chr7:44153157-44153429
  hypo
  myeloid_neoplasm vs. melanoma,lymphoid_neoplasm,prostate, renal,cervical
cgctctggggcagccggatcgttctccctccgcagccagtggtggtgattactggcgaatcttgaacccgggtgagtaccgcgtgacagcccacgcggagggctacaccccgagcgccaagacctgcaatgttgactatgacatcggggccactcagtgcaacttcatcctggctcgctccaactggaagcgcatccgggagatcatggccatgaacgggaaccggcctatcccacacatagacccatcgcgccctatgaccccccaacagc

SEQ ID NO: 472319 - DNA, 3 bp, Homo sapiens
  chr7:44153622-44153625
  hypo
  myeloid_neoplasm vs. melanoma,lymphoid_neoplasm,prostate, renal,cervical
gtc

SEQ ID NO: 472320 - DNA, 367 bp, Homo sapiens
  chr7:44746549-44746916
  hypo
  myeloid_neoplasm vs. upper_gi,bladder_and_urothelial, uterine,breast,sarcoma,melanoma,colorectal,head_and_neck, non_cancer,prostate
cgaagtctgagccaagctgttttgaaggctagcctggtgttacttgatacccagagctggccatgtctgctgtgtatttgttacacgtaacgtgcttttcaaagtgtgcctggtctgagcaaatacagggcatcagaggctggtgaaggggaagcatctctaacccttgaaagctgcgtctcctggcagcagtccctggcacagccctgggcccaggagagctctcagccacatacctgagagaaccagcctagccatgggaactctcttgtaggaacccacttccagcgggtgatcccagaagatggccctgcagctcagaacccagaaaatgtcaaaaggcttctcttctgcaccggcaaagtgt

SEQ ID NO: 472321 - DNA, 79 bp, Homo sapiens; identical to SEQ ID NO: 364382
  chr7:44746945-44747024
  hypo
  myeloid_neoplasm vs. upper_gi,bladder_and_urothelial, uterine,breast,sarcoma,melanoma,colorectal,head_and_neck, non_cancer,prostate

SEQ ID NO: 472322 - DNA, 19 bp, Homo sapiens
  chr7:45222845-45222864
  hypo
cggcatccacaggcagttc

SEQ ID NO: 472323 - DNA, 47 bp, Homo sapiens; identical to SEQ ID NO: 364386
  chr7:45222971-45223018
  hypo

SEQ ID NO: 472324 - DNA, 94 bp, Homo sapiens; identical to SEQ ID NO: 339497
  chr7:48147036-48147130
  hypo
  myeloid_neoplasm vs. melanoma

SEQ ID NO: 472325 - DNA, 154 bp, Homo sapiens; identical to SEQ ID NO: 353987
  chr7:52736911-52737065
  hypo
  myeloid_neoplasm vs. non_cancer,lymphoid_neoplasm, uterine,prostate,renal,breast,cervical

SEQ ID NO: 472326 - DNA, 46 bp, Homo sapiens
  chr7:55223544-55223590
  hypo
  myeloid_neoplasm vs. sarcoma
cggctcgtgcgtccgagcctgtggggccgacagctatgagatggag

SEQ ID NO: 472327 - DNA, 28 bp, Homo sapiens
  chr7:55223636-55223664
  hypo
  myeloid_neoplasm vs. sarcoma
aaggtaggaagcccgccggtgtgcggac

SEQ ID NO: 472328 - DNA, 573 bp, Homo sapiens; identical to SEQ ID NO: 339513
  chr7:55553240-55553813
  hypo
  myeloid_neoplasm vs. anorectal,cervical

SEQ ID NO: 472329 - DNA, 103 bp, Homo sapiens; identical to SEQ ID NO: 465734
  chr7:57247618-57247721
  hypo
  myeloid_neoplasm vs. anorectal

SEQ ID NO: 472330 - DNA, 158 bp, Homo sapiens; identical to SEQ ID NO: 378185
  chr7:57247887-57248045
  hypo
  myeloid_neoplasm vs. anorectal

SEQ ID NO: 472331 - DNA, 54 bp, Homo sapiens; identical to SEQ ID NO: 463875
  chr7:63652630-63652684
  hypo
  myeloid_neoplasm vs. thyroid

SEQ ID NO: 472332 - DNA, 122 bp, Homo sapiens; identical to SEQ ID NO: 364412
  chr7:63652839-63652961
  hypo
  myeloid_neoplasm vs. thyroid

SEQ ID NO: 472333 - DNA, 122 bp, Homo sapiens; identical to SEQ ID NO: 462094
  chr7:76106210-76106332
  hypo
  myeloid_neoplasm vs. uterine,renal

SEQ ID NO: 472334 - DNA, 102 bp, Homo sapiens; identical to SEQ ID NO: 364427
  chr7:76106380-76106482
  hypo
  myeloid_neoplasm vs. uterine,renal

SEQ ID NO: 472335 - DNA, 4 bp, Homo sapiens
  chr7:76631508-76631512
  hypo
  myeloid_neoplasm vs. anorectal
cgca

SEQ ID NO: 472336 - DNA, 75 bp, Homo sapiens; identical to SEQ ID NO: 364428
  chr7:76631604-76631679
  hypo
  myeloid_neoplasm vs. anorectal

SEQ ID NO: 472337 - DNA, 493 bp, Homo sapiens; identical to SEQ ID NO: 463880
  chr7:86415591-86416084
  hypo
  myeloid_neoplasm vs. thyroid

SEQ ID NO: 472338 - DNA, 37 bp, Homo sapiens; identical to SEQ ID NO: 364435
  chr7:86416125-86416162
  hypo
  myeloid_neoplasm vs. thyroid

SEQ ID NO: 472339 - DNA, 260 bp, Homo sapiens; identical to SEQ ID NO: 339568
  chr7:99819908-99820168
  hypo
  myeloid_neoplasm vs. uterine,cervical,head_and_neck

SEQ ID NO: 472340 - DNA, 217 bp, Homo sapiens; identical to SEQ ID NO: 339575
  chr7:100405032-100405249
  hypo
  myeloid_neoplasm vs. liver_bileduct,cervical,upper_gi, colorectal

SEQ ID NO: 472341 - DNA, 197 bp, Homo sapiens; identical to SEQ ID NO: 462100
  chr7:101603073-101603270
  hypo
  myeloid_neoplasm vs. cervical

SEQ ID NO: 472342 - DNA, 242 bp, Homo sapiens; identical to SEQ ID NO: 345916
  chr7:101603308-101603550
  hypo
  myeloid_neoplasm vs. cervical

SEQ ID NO: 472343 - DNA, 429 bp, Homo sapiens; identical to SEQ ID NO: 339587
  chr7:101649223-101649652
  hypo
  myeloid_neoplasm vs. liver_bileduct

SEQ ID NO: 472344 - DNA, 174 bp, Homo sapiens; identical to SEQ ID NO: 339608
  chr7:127670460-127670634
  hypo
  myeloid_neoplasm vs. sarcoma,melanoma,liver_bileduct, pancreas_gallbladder,ovary

SEQ ID NO: 472345 - DNA, 62 bp, Homo sapiens
  chr7:132418888-132418950
  hypo
  myeloid_neoplasm vs. thyroid,renal,prostate,non_cancer, sarcoma,breast,bladder_and_urothelial,head_and_neck,uterine, melanoma,pancreas_gallbladder
cgcccccacctgagcctataaaaaccggataccctagcaaggcagagacagaagctgttgga

SEQ ID NO: 472346 - DNA, 42 bp, Homo sapiens; identical to SEQ ID NO: 345920
  chr7:132419066-132419108
  hypo
  myeloid_neoplasm vs. thyroid,renal,prostate,non_cancer, sarcoma,breast,bladder_and_urothelial,head_and_neck,uterine, melanoma,pancreas_gallbladder

SEQ ID NO: 472347 - DNA, 86 bp, Homo sapiens; identical to SEQ ID NO: 457149
  chr7:134918319-134918405
  hypo
  myeloid_neoplasm vs. sarcoma,lymphoid_neoplasm, liver_bileduct

SEQ ID NO: 472348 - DNA, 132 bp, Homo sapiens; identical to SEQ ID NO: 345922
  chr7:134918661-134918793
  hypo
  myeloid_neoplasm vs. sarcoma,lymphoid_neoplasm, liver_bileduct

SEQ ID NO: 472349 - DNA, 4 bp, Homo sapiens
  chr7:135412144-135412148
  hypo
  myeloid_neoplasm vs. bladder_and_urothelial,anorectal
cgct

SEQ ID NO: 472350 - DNA, 209 bp, Homo sapiens; identical to SEQ ID NO: 364512
  chr7:135412177-135412386
  hypo
  myeloid_neoplasm vs. bladder_and_urothelial,anorectal

SEQ ID NO: 472351 - DNA, 256 bp, Homo sapiens; identical to SEQ ID NO: 339645
  chr7:139257804-139258060
  hypo
  myeloid_neoplasm vs. sarcoma,head_and_neck, bladder_and_urothelial

SEQ ID NO: 472352 - DNA, 176 bp, Homo sapiens; identical to SEQ ID NO: 339647
  chr7:139717431-139717607
  hypo
  myeloid_neoplasm vs. melanoma,colorectal,cervical, bladder_and_urothelial,uterine,upper_gi,pancreas_gallbladder, prostate,breast,non_cancer,renal,ovary,head_and_neck,lung, lymphoid_neoplasm,liver_bileduct

SEQ ID NO: 472353 - DNA, 158 bp, Homo sapiens; identical to SEQ ID NO: 339665
  chr7:148979109-148979267
  hypo
  myeloid_neoplasm vs. melanoma

SEQ ID NO: 472354 - DNA, 100 bp, Homo sapiens; identical to SEQ ID NO: 460508
  chr7:150069580-150069680
  hypo
  myeloid_neoplasm vs. head_and_neck,pancreas_gallbladder, melanoma

SEQ ID NO: 472355 - DNA, 115 bp, Homo sapiens; identical to SEQ ID NO: 460509
  chr7:150069820-150069935
  hypo
  myeloid_neoplasm vs. head_and_neck,pancreas_gallbladder, melanoma

SEQ ID NO: 472356 - DNA, 100 bp, Homo sapiens; identical to SEQ ID NO: 460508
  chr7:150069580-150069680
  hypo
  myeloid_neoplasm vs. melanoma

SEQ ID NO: 472357 - DNA, 115 bp, Homo sapiens; identical to SEQ ID NO: 460509
  chr7:150069820-150069935
  hypo
  myeloid_neoplasm vs. melanoma

SEQ ID NO: 472358 - DNA, 960 bp, Homo sapiens; identical to SEQ ID NO: 333303
  chr7:150784079-150785039
  hypo
  myeloid_neoplasm vs. liver_bileduct

SEQ ID NO: 472359 - DNA, 313 bp, Homo sapiens
  chr7:150812868-150813181
  hypo
  myeloid_neoplasm vs. anorectal,thyroid,prostate,renal, sarcoma,melanoma
cgtctggggtcttcggcagtggccgaggaggacaggccggagggggagctctcgggtgcggcccaggaaaggaagaggagactcaccagagtcagagggctctgggctaggccagacacctttcctagttccctgtcggggcagcgcgctcgcctccggttgcccctgtgcatgaggttagggactgctgtggacctggtcgtcataactgctctttgacacaaacttgggacagtgcctctgggagccagggagggaagcagtgctgcccagctagagaggggttcccagagctagcccgagcacccatgtg

SEQ ID NO: 472360 - DNA, 114 bp, Homo sapiens; identical to SEQ ID NO: 364547
  chr7:150813210-150813324
  hypo
  myeloid_neoplasm vs. anorectal,thyroid,prostate,renal, sarcoma,melanoma

SEQ ID NO: 472361 - DNA, 557 bp, Homo sapiens; identical to SEQ ID NO: 339682
  chr7:150816833-150817390
  hypo
  myeloid_neoplasm vs. liver_bileduct

SEQ ID NO: 472362 - DNA, 370 bp, Homo sapiens; identical to SEQ ID NO: 333305
  chr7:151038589-151038959
  hypo
  myeloid_neoplasm vs. lung,liver_bileduct,upper_gi, uterine,pancreas_gallbladder,non_cancer,prostate,head_and_neck, breast,cervical,ovary,melanoma,colorectal,lymphoid_neoplasm, thyroid,anorectal

SEQ ID NO: 472363 - DNA, 154 bp, Homo sapiens; identical to SEQ ID NO: 339692
  chr7:151802406-151802560
  hypo
  myeloid_neoplasm vs. multiple_myeloma

SEQ ID NO: 472364 - DNA, 193 bp, Homo sapiens; identical to SEQ ID NO: 339696
  chr7:152562704-152562897
  hypo
  myeloid_neoplasm vs. melanoma

SEQ ID NO: 472365 - DNA, 3 bp, Homo sapiens
  chr7:154922505-154922508
  hypo
  myeloid_neoplasm vs. anorectal,thyroid
cgt

SEQ ID NO: 472366 - DNA, 172 bp, Homo sapiens; identical to SEQ ID NO: 339700
  chr7:155079954-155080126
  hypo
  myeloid_neoplasm vs. sarcoma

SEQ ID NO: 472367 - DNA, 78 bp, Homo sapiens; identical to SEQ ID NO: 354099
  chr7:155898307-155898385
  hypo
  myeloid_neoplasm vs. prostate,anorectal, lymphoid_neoplasm,non_cancer

SEQ ID NO: 472368 - DNA, 288 bp, Homo sapiens; identical to SEQ ID NO: 339712
  chr7:155916075-155916363
  hypo
  myeloid_neoplasm vs. lymphoid_neoplasm

SEQ ID NO: 472369 - DNA, 32 bp, Homo sapiens
  chr7:156734691-156734723
  hypo
  myeloid_neoplasm vs. bladder_and_urothelial,sarcoma
cgcgaatgggtgacgaggcgcgattgggtgac

SEQ ID NO: 472370 - DNA, 169 bp, Homo sapiens; identical to SEQ ID NO: 339717
  chr7:156782599-156782768
  hypo
  myeloid_neoplasm vs. pancreas_gallbladder,thyroid, colorectal,breast,upper_gi,sarcoma,renal,head_and_neck,uterine, prostate,lung,cervical,non_cancer,bladder_and_urothelial

SEQ ID NO: 472371 - DNA, 150 bp, Homo sapiens; identical to SEQ ID NO: 364577
  chr7:157086147-157086297
  hypo
  myeloid_neoplasm vs. bladder_and_urothelial

SEQ ID NO: 472372 - DNA, 144 bp, Homo sapiens; identical to SEQ ID NO: 339724
  chr7:157100035-157100179
  hypo
  myeloid_neoplasm vs. lymphoid_neoplasm,lung, liver_bileduct,ovary

SEQ ID NO: 472373 - DNA, 650 bp, Homo sapiens; identical to SEQ ID NO: 348277
  chr7:157202474-157203124
  hypo
  myeloid_neoplasm vs. lymphoid_neoplasm,liver_bileduct, melanoma,prostate,uterine

SEQ ID NO: 472374 - DNA, 309 bp, Homo sapiens; identical to SEQ ID NO: 339733
  chr7:157336700-157337009
  hypo
  myeloid_neoplasm vs. lymphoid_neoplasm

SEQ ID NO: 472375 - DNA, 159 bp, Homo sapiens; identical to SEQ ID NO: 463901
  chr7:157404210-157404369
  hypo
  myeloid_neoplasm vs. lymphoid_neoplasm,thyroid,cervical, bladder_and_urothelial,colorectal,lung

SEQ ID NO: 472376 - DNA, 46 bp, Homo sapiens; identical to SEQ ID NO: 354109
  chr7:157404566-157404612
  hypo
  myeloid_neoplasm vs. lymphoid_neoplasm,thyroid,cervical, bladder_and_urothelial,colorectal,lung

SEQ ID NO: 472377 - DNA, 297 bp, Homo sapiens; identical to SEQ ID NO: 463904
  chr7:157445780-157446077
  hypo
  myeloid_neoplasm vs. anorectal,lymphoid_neoplasm,renal, thyroid,non_cancer,prostate

SEQ ID NO: 472378 - DNA, 69 bp, Homo sapiens; identical to SEQ ID NO: 339741
  chr7:157446148-157446217
  hypo
  myeloid_neoplasm vs. anorectal,lymphoid_neoplasm,renal, thyroid,non_cancer,prostate

SEQ ID NO: 472379 - DNA, 203 bp, Homo sapiens; identical to SEQ ID NO: 339758
  chr7:157642963-157643166
  hypo
  myeloid_neoplasm vs. anorectal,non_cancer

SEQ ID NO: 472380 - DNA, 230 bp, Homo sapiens; identical to SEQ ID NO: 339759
  chr7:157653875-157654105
  hypo
  myeloid_neoplasm vs. uterine,lymphoid_neoplasm

SEQ ID NO: 472381 - DNA, 79 bp, Homo sapiens; identical to SEQ ID NO: 354119
  chr7:157703411-157703490
  hypo
  myeloid_neoplasm vs. lymphoid_neoplasm,anorectal, colorectal

SEQ ID NO: 472382 - DNA, 39 bp, Homo sapiens; identical to SEQ ID NO: 463927
  chr7:157934555-157934594
  hypo
  myeloid_neoplasm vs. anorectal,lymphoid_neoplasm, prostate,thyroid,renal,non_cancer

SEQ ID NO: 472383 - DNA, 92 bp, Homo sapiens; identical to SEQ ID NO: 348285
  chr7:157934659-157934751
  hypo
  myeloid_neoplasm vs. anorectal,lymphoid_neoplasm, prostate,thyroid,renal,non_cancer

SEQ ID NO: 472384 - DNA, 195 bp, Homo sapiens; identical to SEQ ID NO: 364630
  chr7:158103405-158103600
  hypo
  myeloid_neoplasm vs. anorectal,thyroid,lymphoid_neoplasm, cervical

SEQ ID NO: 472385 - DNA, 159 bp, Homo sapiens; identical to SEQ ID NO: 371772
  chr8:798791-798950
  hypo
  myeloid_neoplasm vs. upper_gi

SEQ ID NO: 472386 - DNA, 377 bp, Homo sapiens; identical to SEQ ID NO: 470794
  chr8:972329-972706
  hypo
  myeloid_neoplasm vs. cervical

SEQ ID NO: 472387 - DNA, 270 bp, Homo sapiens
  chr8:1150825-1151095
  hypo
  myeloid_neoplasm vs. anorectal
cgctttgttttccgttcccacatatcggtttggcatcgaacgatgcgtccgctgctggctcccgtgctcggtttctccacgccgcctccgggcggtgcgcgattcagctccaggagcgtgttgtgcacggcggggcgctgcgctcggccttagggaaagaaggcgcggctgtctccccggaccccaccgttagggacccacacctagaggtgagtgtggcgtgagcggccaggcgggtgccgagatgcccagagaccagcactggggagg

SEQ ID NO: 472388 - DNA, 203 bp, Homo sapiens; identical to SEQ ID NO: 378486
  chr8:1151189-1151392
  hypo
  myeloid_neoplasm vs. anorectal

SEQ ID NO: 472389 - DNA, 117 bp, Homo sapiens; identical to SEQ ID NO: 364651
  chr8:1326617-1326734
  hypo
  myeloid_neoplasm vs. sarcoma

SEQ ID NO: 472390 - DNA, 50 bp, Homo sapiens
  chr8:1379963-1380013
  hypo
  myeloid_neoplasm vs. non_cancer,bladder_and_urothelial
cgtgcatgacagggactcttctgatgcctccgtgtcgatggccaccaagc

SEQ ID NO: 472391 - DNA, 51 bp, Homo sapiens; identical to SEQ ID NO: 378489
  chr8:1380172-1380223
  hypo
  myeloid_neoplasm vs. non_cancer,bladder_and_urothelial

SEQ ID NO: 472392 - DNA, 169 bp, Homo sapiens; identical to SEQ ID NO: 339824
  chr8:3509598-3509767
  hypo
  myeloid_neoplasm vs. anorectal,thyroid,cervical,uterine, non_cancer,colorectal,lymphoid_neoplasm

SEQ ID NO: 472393 - DNA, 140 bp, Homo sapiens; identical to SEQ ID NO: 333372
  chr8:11726011-11726151
  hypo
  myeloid_neoplasm vs. upper_gi,colorectal, multiple_myeloma

SEQ ID NO: 472394 - DNA, 45 bp, Homo sapiens; identical to SEQ ID NO: 339853
  chr8:21624023-21624068
  hypo

SEQ ID NO: 472395 - DNA, 429 bp, Homo sapiens; identical to SEQ ID NO: 339858
  chr8:22874780-22875209
  hypo
  myeloid_neoplasm vs. liver_bileduct

SEQ ID NO: 472396 - DNA, 311 bp, Homo sapiens; identical to SEQ ID NO: 350731
  chr8:26148757-26149068
  hypo
  myeloid_neoplasm vs. ovary,pancreas_gallbladder, bladder_and_urothelial,colorectal,upper_gi,non_cancer, lymphoid_neoplasm,prostate,uterine,multiple_myeloma,renal, breast

SEQ ID NO: 472397 - DNA, 320 bp, Homo sapiens; identical to SEQ ID NO: 455427
  chr8:27779460-27779780
  hypo
  myeloid_neoplasm vs. sarcoma,lymphoid_neoplasm,uterine, thyroid,renal,anorectal

SEQ ID NO: 472398 - DNA, 18 bp, Homo sapiens
  chr8:27779809-27779827
  hypo
  myeloid_neoplasm vs. sarcoma,lymphoid_neoplasm,uterine, thyroid,renal,anorectal
ccccgggtgacaagaggc

SEQ ID NO: 472399 - DNA, 84 bp, Homo sapiens; identical to SEQ ID NO: 339876
  chr8:29053260-29053344
  hypo
  myeloid_neoplasm vs. lung

SEQ ID NO: 472400 - DNA, 95 bp, Homo sapiens; identical to SEQ ID NO: 364702
  chr8:41478653-41478748
  hypo
  myeloid_neoplasm vs. lymphoid_neoplasm,upper_gi, pancreas_gallbladder

SEQ ID NO: 472401 - DNA, 157 bp, Homo sapiens; identical to SEQ ID NO: 339892
  chr8:42146058-42146215
  hypo

SEQ ID NO: 472402 - DNA, 69 bp, Homo sapiens; identical to SEQ ID NO: 457170
  chr8:49334914-49334983
  hypo
  myeloid_neoplasm vs. anorectal,melanoma

SEQ ID NO: 472403 - DNA, 262 bp, Homo sapiens; identical to SEQ ID NO: 339911
  chr8:49747358-49747620
  hypo
  myeloid_neoplasm vs. head_and_neck,melanoma

SEQ ID NO: 472404 - DNA, 145 bp, Homo sapiens; identical to SEQ ID NO: 339955
  chr8:73979624-73979769
  hypo
  myeloid_neoplasm vs. head_and_neck,ovary

SEQ ID NO: 472405 - DNA, 91 bp, Homo sapiens
  chr8:74674345-74674436
  hypo
  myeloid_neoplasm vs. head_and_neck,renal,anorectal, cervical,bladder_and_urothelial,breast,lymphoid_neoplasm, pancreas_gallbladder,upper_gi,lung,uterine,non_cancer
cggcggcaaaggtaaaaggccgacgacaacggacttggtccaggtgaacccacctgacaggcgcacgaaaacttcccttgccctccccggc

SEQ ID NO: 472406 - DNA, 194 bp, Homo sapiens; identical to SEQ ID NO: 350823
  chr8:119123513-119123707
  hypo
  myeloid_neoplasm vs. lung,pancreas_gallbladder, liver_bileduct,multiple_myeloma,ovary,uterine,prostate, bladder_and_urothelial,renal,head_and_neck,non_cancer, colorectal,melanoma,sarcoma,upper_gi,cervical

SEQ ID NO: 472407 - DNA, 308 bp, Homo sapiens; identical to SEQ ID NO: 340013
  chr8:124730010-124730318
  hypo
  myeloid_neoplasm vs. liver_bileduct,ovary

SEQ ID NO: 472408 - DNA, 171 bp, Homo sapiens; identical to SEQ ID NO: 340039
  chr8:134335659-134335830
  hypo
  myeloid_neoplasm vs. melanoma

SEQ ID NO: 472409 - DNA, 482 bp, Homo sapiens; identical to SEQ ID NO: 340048
  chr8:140815079-140815561
  hypo
  myeloid_neoplasm vs. colorectal,sarcoma,melanoma

SEQ ID NO: 472410 - DNA, 321 bp, Homo sapiens
  chr8:140971025-140971346
  hypo
  myeloid_neoplasm vs. bladder_and_urothelial,upper_gi, renal,anorectal,prostate,thyroid,non_cancer,lymphoid_neoplasm, head_and_neck,pancreas_gallbladder,breast,lung,ovary,uterine, colorectal,sarcoma
cgccccgaggcaggacagggtgtgcagtcagcttccttagacatgtaaggagtgccttttcctttccacaaggaaaaggggagttgtgtagacaccatgagatgtgaccactgccctcgggaacacatgccagagatgacagcctgacacagagcactgcattccgagtcacacagaggagcactgcattccgagtcacacaggggagccctgcattccgagtcacacaggggagcactgcattccgagtcacacgggggagcactgcattccgagtcacacgggggagcactgcattccgagtcacacgggggaggcctg

SEQ ID NO: 472411 - DNA, 148 bp, Homo sapiens; identical to SEQ ID NO: 348322
  chr8:140971375-140971523
  hypo
  myeloid_neoplasm vs. bladder_and_urothelial,upper_gi, renal,anorectal,prostate,thyroid,non_cancer,lymphoid_neoplasm, head_and_neck,pancreas_gallbladder,breast,lung,ovary,uterine, colorectal,sarcoma

SEQ ID NO: 472412 - DNA, 90 bp, Homo sapiens; identical to SEQ ID NO: 340054
  chr8:140992426-140992516
  hypo
  myeloid_neoplasm vs. liver_bileduct,melanoma,thyroid, pancreas_gallbladder,anorectal,uterine

SEQ ID NO: 472413 - DNA, 133 bp, Homo sapiens
  chr8:141107408-141107541
  hypo
  myeloid_neoplasm vs. upper_gi,liver_bileduct
cggctcacccgagtccgccatgcgcagccctgccactgtctgcagggtaaggacgcccacctgggttcttgtgccagccacagttgtgccacagtccgtagggtaaggactcccccagagtaaggactcccgc

SEQ ID NO: 472414 - DNA, 156 bp, Homo sapiens; identical to SEQ ID NO: 378711
  chr8:141107863-141108019
  hypo
  myeloid_neoplasm vs. upper_gi,liver_bileduct

SEQ ID NO: 472415 - DNA, 191 bp, Homo sapiens; identical to SEQ ID NO: 465808
  chr8:142242748-142242939
  hypo
  myeloid_neoplasm vs. melanoma

SEQ ID NO: 472416 - DNA, 241 bp, Homo sapiens; identical to SEQ ID NO: 340094
  chr8:143234575-143234816
  hypo
  myeloid_neoplasm vs. non_cancer,thyroid

SEQ ID NO: 472417 - DNA, 37 bp, Homo sapiens; identical to SEQ ID NO: 457205
  chr8:143334502-143334539
  hypo
  myeloid_neoplasm vs. anorectal

SEQ ID NO: 472418 - DNA, 302 bp, Homo sapiens
  chr8:143386497-143386799
  hypo
  myeloid_neoplasm vs. bladder_and_urothelial,colorectal
cgggcgagtgagatggccaggtggagaaggcaccacaggacgttctgtgcgatgttccctggacttgggggtttcagtgacagctccccaggagctgtgggcagagggtgccaggcacccatggagacctgcctcggatctgtgccttgggattgatgccacctcctgcatgtggagaaggggaagctcaggaggataggggagggcgcaggggtgggaggggggtgcaaacggggttccgtgtggacgcccaggaaagcggccaggctggggtgcgggctgtgtggacacccaggaaggca

SEQ ID NO: 472419 - DNA, 388 bp, Homo sapiens; identical to SEQ ID NO: 364870
  chr8:143386940-143387328
  hypo
  myeloid_neoplasm vs. bladder_and_urothelial,colorectal

SEQ ID NO: 472420 - DNA, 162 bp, Homo sapiens; identical to SEQ ID NO: 364871
  chr8:143397305-143397467
  hypo
  myeloid_neoplasm vs. bladder_and_urothelial, liver_bileduct,lung,colorectal

SEQ ID NO: 472421 - DNA, 142 bp, Homo sapiens
  chr8:143436836-143436978
  hypo
  myeloid_neoplasm vs. liver_bileduct,head_and_neck
cggccgtccctggaatggggagctgggcatcccgcccaaacctctcctcccgtgggctgcagctccagggactcagagcaaatgaccagaggataacgggagctctcctgcccagacactgccagagcgtcctccctgtgtg

SEQ ID NO: 472422 - DNA, 220 bp, Homo sapiens; identical to SEQ ID NO: 340107
  chr8:143582357-143582577
  hypo
  myeloid_neoplasm vs. lymphoid_neoplasm,colorectal, pancreas_gallbladder,bladder_and_urothelial

SEQ ID NO: 472423 - DNA, 242 bp, Homo sapiens; identical to SEQ ID NO: 470826
  chr8:143660391-143660633
  hypo
  myeloid_neoplasm vs. anorectal

SEQ ID NO: 472424 - DNA, 5 bp, Homo sapiens
  chr8:143660669-143660674
  hypo
  myeloid_neoplasm vs. anorectal
actcc

SEQ ID NO: 472425 - DNA, 423 bp, Homo sapiens; identical to SEQ ID NO: 354279
  chr8:144205313-144205736
  hypo
  myeloid_neoplasm vs. sarcoma,melanoma

SEQ ID NO: 472426 - DNA, 112 bp, Homo sapiens; identical to SEQ ID NO: 364884
  chr8:144222962-144223074
  hypo
  myeloid_neoplasm vs. cervical

SEQ ID NO: 472427 - DNA, 237 bp, Homo sapiens
  chr8:144413516-144413753
  hypo
  myeloid_neoplasm vs. melanoma,prostate,breast
cggagacaggacgtgtcactctcctgggccaggccctgcatgagcctcttccccgctcccacagtggctcctccctgtggctcctagcaggtgagcagtgtggcctccacctcacgggggaggaaaacaaggcctgcagagggaggcaaccctacctgacctcagaccccatgcccgtgtacccgcccatgccccccacctgcagaggcccgtgtgctgctgagtcacggatcccac

SEQ ID NO: 472428 - DNA, 244 bp, Homo sapiens; identical to SEQ ID NO: 354289
  chr8:144413782-144414026
  hypo
  myeloid_neoplasm vs. melanoma,prostate,breast

SEQ ID NO: 472429 - DNA, 48 bp, Homo sapiens; identical to SEQ ID NO: 459207
  chr8:144589930-144589978
  hypo
  myeloid_neoplasm vs. melanoma

SEQ ID NO: 472430 - DNA, 220 bp, Homo sapiens; identical to SEQ ID NO: 364903
  chr8:144590082-144590302
  hypo
  myeloid_neoplasm vs. melanoma

SEQ ID NO: 472431 - DNA, 161 bp, Homo sapiens; identical to SEQ ID NO: 340134
  chr8:144621169-144621330
  hypo
  myeloid_neoplasm vs. head_and_neck,lymphoid_neoplasm, ovary,upper_gi,pancreas_gallbladder,melanoma,breast

SEQ ID NO: 472432 - DNA, 154 bp, Homo sapiens; identical to SEQ ID NO: 340144
  chr8:145661380-145661534
  hypo
  myeloid_neoplasm vs. liver_bileduct,head_and_neck

SEQ ID NO: 472433 - DNA, 541 bp, Homo sapiens; identical to SEQ ID NO: 340149
  chr8:145813621-145814162
  hypo
  myeloid_neoplasm vs. head_and_neck,pancreas_gallbladder, thyroid

SEQ ID NO: 472434 - DNA, 632 bp, Homo sapiens; identical to SEQ ID NO: 340150
  chr8:145845229-145845861
  hypo
  myeloid_neoplasm vs. cervical,lung,breast,uterine, lymphoid_neoplasm,upper_gi,thyroid,anorectal,ovary,non_cancer

SEQ ID NO: 472435 - DNA, 96 bp, Homo sapiens; identical to SEQ ID NO: 340151
  chr8:145854692-145854788
  hypo
  myeloid_neoplasm vs. bladder_and_urothelial,upper_gi, pancreas_gallbladder,ovary,prostate

SEQ ID NO: 472436 - DNA, 526 bp, Homo sapiens; identical to SEQ ID NO: 333600
  chr8:145910996-145911522
  hypo
  myeloid_neoplasm vs. liver_bileduct,cervical

SEQ ID NO: 472437 - DNA, 440 bp, Homo sapiens; identical to SEQ ID NO: 340164
  chr9:2047360-2047800
  hypo
  myeloid_neoplasm vs. pancreas_gallbladder

SEQ ID NO: 472438 - DNA, 205 bp, Homo sapiens; identical to SEQ ID NO: 340173
  chr9:6997072-6997277
  hypo
  myeloid_neoplasm vs. cervical

SEQ ID NO: 472439 - DNA, 2 bp, Homo sapiens
  chr9:13323299-13323301
  hypo
  myeloid_neoplasm vs. renal,lymphoid_neoplasm,anorectal, non_cancer
cg

SEQ ID NO: 472440 - DNA, 125 bp, Homo sapiens; identical to SEQ ID NO: 354307
  chr9:13323322-13323447
  hypo
  myeloid_neoplasm vs. renal,lymphoid_neoplasm,anorectal, non_cancer

SEQ ID NO: 472441 - DNA, 194 bp, Homo sapiens; identical to SEQ ID NO: 340178
  chr9:14232126-14232320
  hypo
  myeloid_neoplasm vs. cervical

SEQ ID NO: 472442 - DNA, 983 bp, Homo sapiens; identical to SEQ ID NO: 467813
  chr9:14314414-14315397
  hypo
  myeloid_neoplasm vs. liver_bileduct

SEQ ID NO: 472443 - DNA, 897 bp, Homo sapiens; identical to SEQ ID NO: 467814
  chr9:14314899-14315796
  hypo
  myeloid_neoplasm vs. upper_gi,liver_bileduct,lung,ovary, sarcoma,colorectal,prostate,cervical,breast,head_and_neck

SEQ ID NO: 472444 - DNA, 360 bp, Homo sapiens; identical to SEQ ID NO: 340203
  chr9:37950454-37950814
  hypo
  myeloid_neoplasm vs. prostate

SEQ ID NO: 472445 - DNA, 112 bp, Homo sapiens; identical to SEQ ID NO: 340209
  chr9:75271069-75271181
  hypo
  myeloid_neoplasm vs. lymphoid_neoplasm

SEQ ID NO: 472446 - DNA, 77 bp, Homo sapiens
  chr9:78557022-78557099
  hypo
cgggcatgcgccaaagcgtagcgcactcgttgcctgcccggagcagctgctaccaactgaggccggctgtcctcagg

SEQ ID NO: 472447 - DNA, 429 bp, Homo sapiens; identical to SEQ ID NO: 347043
  chr9:97767434-97767863
  hypo
  myeloid_neoplasm vs. liver_bileduct,upper_gi, pancreas_gallbladder,head_and_neck,renal,bladder_and_urothelial, breast,lung,sarcoma,ovary,colorectal,cervical,uterine, non_cancer,thyroid,anorectal

SEQ ID NO: 472448 - DNA, 124 bp, Homo sapiens; identical to SEQ ID NO: 340250
  chr9:97808146-97808270
  hypo
  myeloid_neoplasm vs. melanoma,breast,head_and_neck,lung, cervical,ovary,prostate,lymphoid_neoplasm, bladder_and_urothelial,liver_bileduct,upper_gi,uterine

SEQ ID NO: 472449 - DNA, 864 bp, Homo sapiens; identical to SEQ ID NO: 350910
  chr9:98272643-98273507
  hypo
  myeloid_neoplasm vs. ovary

SEQ ID NO: 472450 - DNA, 818 bp, Homo sapiens; identical to SEQ ID NO: 471327
  chr9:98273089-98273907
  hypo
  myeloid_neoplasm vs. ovary

SEQ ID NO: 472451 - DNA, 274 bp, Homo sapiens; identical to SEQ ID NO: 465835
  chr9:116059825-116060099
  hypo
  myeloid_neoplasm vs. sarcoma,renal,cervical,thyroid, upper_gi,uterine,breast,non_cancer,pancreas_gallbladder, colorectal,prostate,anorectal,lymphoid_neoplasm,head_and_neck, ovary,bladder_and_urothelial

SEQ ID NO: 472452 - DNA, 631 bp, Homo sapiens; identical to SEQ ID NO: 345967
  chr9:116060128-116060759
  hypo
  myeloid_neoplasm vs. sarcoma,renal,cervical,thyroid, upper_gi,uterine,breast,non_cancer,pancreas_gallbladder, colorectal,prostate,anorectal,lymphoid_neoplasm,head_and_neck, ovary,bladder_and_urothelial

SEQ ID NO: 472453 - DNA, 55 bp, Homo sapiens; identical to SEQ ID NO: 340304
  chr9:124639413-124639468
  hypo
  myeloid_neoplasm vs. melanoma

SEQ ID NO: 472454 - DNA, 83 bp, Homo sapiens; identical to SEQ ID NO: 463093
  chr9:124990438-124990521
  hypo
  myeloid_neoplasm vs. melanoma,uterine,anorectal,breast, ovary,prostate,non_cancer,thyroid,bladder_and_urothelial,lung, multiple_myeloma,head_and_neck,renal,sarcoma,colorectal, cervical

SEQ ID NO: 472455 - DNA, 142 bp, Homo sapiens; identical to SEQ ID NO: 345329
  chr9:124991012-124991154
  hypo
  myeloid_neoplasm vs. melanoma,uterine,anorectal,breast, ovary,prostate,non_cancer,thyroid,bladder_and_urothelial,lung, multiple_myeloma,head_and_neck,renal,sarcoma,colorectal, cervical

SEQ ID NO: 472456 - DNA, 610 bp, Homo sapiens; identical to SEQ ID NO: 340343
  chr9:132230776-132231386
  hypo
  myeloid_neoplasm vs. ovary

SEQ ID NO: 472457 - DNA, 424 bp, Homo sapiens; identical to SEQ ID NO: 471337
  chr9:132245345-132245769
  hypo
  myeloid_neoplasm vs. lung,liver_bileduct,upper_gi

SEQ ID NO: 472458 - DNA, 728 bp, Homo sapiens; identical to SEQ ID NO: 359438
  chr9:132245345-132246073
  hypo
  myeloid_neoplasm vs. lung,upper_gi,liver_bileduct, uterine,multiple_myeloma

SEQ ID NO: 472459 - DNA, 344 bp, Homo sapiens; identical to SEQ ID NO: 365088
  chr9:133366650-133366994
  hypo
  myeloid_neoplasm vs. liver_bileduct

SEQ ID NO: 472460 - DNA, 904 bp, Homo sapiens; identical to SEQ ID NO: 471340
  chr9:133710055-133710959
  hypo
  myeloid_neoplasm vs. colorectal,liver_bileduct, pancreas_gallbladder,multiple_myeloma,upper_gi,breast, head_and_neck,lung,ovary,renal,uterine,cervical,thyroid, non_cancer,prostate,anorectal,melanoma,sarcoma,
  CONT. FROM ABOVE: bladder_and_urothelial, lymphoid_neoplasm

SEQ ID NO: 472461 - DNA, 923 bp, Homo sapiens; identical to SEQ ID NO: 471341
  chr9:133710483-133711406
  hypo
  myeloid_neoplasm vs. upper_gi,colorectal, bladder_and_urothelial,liver_bileduct,sarcoma,head_and_neck, lung,ovary,breast,cervical,uterine,renal,pancreas_gallbladder, non_cancer,prostate,anorectal,thyroid,melanoma,multiple_myeloma,
  CONT. FROM ABOVE: lymphoid_neoplasm

SEQ ID NO: 472462 - DNA, 81 bp, Homo sapiens; identical to SEQ ID NO: 340367
  chr9:133738154-133738235
  hypo
  myeloid_neoplasm vs. liver_bileduct

SEQ ID NO: 472463 - DNA, 85 bp, Homo sapiens; identical to SEQ ID NO: 340373
  chr9:133945101-133945186
  hypo
  myeloid_neoplasm vs. melanoma,lung,renal

SEQ ID NO: 472464 - DNA, 222 bp, Homo sapiens; identical to SEQ ID NO: 340392
  chr9:135945862-135946084
  hypo
  myeloid_neoplasm vs. sarcoma,melanoma

SEQ ID NO: 472465 - DNA, 106 bp, Homo sapiens; identical to SEQ ID NO: 348385
  chr9:136698796-136698902
  hypo
  myeloid_neoplasm vs. cervical,renal, bladder_and_urothelial,breast,liver_bileduct,sarcoma

SEQ ID NO: 472466 - DNA, 335 bp, Homo sapiens; identical to SEQ ID NO: 340413
  chr9:138143914-138144249
  hypo
  myeloid_neoplasm vs. anorectal,breast,prostate, non_cancer,uterine

SEQ ID NO: 472467 - DNA, 172 bp, Homo sapiens; identical to SEQ ID NO: 365127
  chr9:138247974-138248146
  hypo
  myeloid_neoplasm vs. renal

SEQ ID NO: 472468 - DNA, 275 bp, Homo sapiens; identical to SEQ ID NO: 455485
  chr9:138660497-138660772
  hypo
  myeloid_neoplasm vs. thyroid,non_cancer,prostate,renal

SEQ ID NO: 472469 - DNA, 3 bp, Homo sapiens
  chr9:138660769-138660772
  hypo
  myeloid_neoplasm vs. renal,thyroid,non_cancer,prostate
cgt

SEQ ID NO: 472470 - DNA, 90 bp, Homo sapiens; identical to SEQ ID NO: 340427
  chr9:138774525-138774615
  hypo
  myeloid_neoplasm vs. head_and_neck,cervical, bladder_and_urothelial,renal

SEQ ID NO: 472471 - DNA, 357 bp, Homo sapiens; identical to SEQ ID NO: 333839
  chr9:139401232-139401589
  hypo
  myeloid_neoplasm vs. pancreas_gallbladder,head_and_neck, cervical,uterine,ovary,renal

SEQ ID NO: 472472 - DNA, 107 bp, Homo sapiens
  chr9:139793021-139793128
  hypo
  myeloid_neoplasm vs. ovary,renal,uterine, bladder_and_urothelial,prostate,melanoma
cgattctgcttctctgagtcttgaccgcaggtcagtggggacccggcccctcaccatcgcctgctactgatcaccattggtttggttttgtctcgaggactgttctg

SEQ ID NO: 472473 - DNA, 53 bp, Homo sapiens; identical to SEQ ID NO: 354437
  chr9:139793190-139793243
  hypo
  myeloid_neoplasm vs. ovary,renal,uterine, bladder_and_urothelial,prostate,melanoma

SEQ ID NO: 472474 - DNA, 126 bp, Homo sapiens; identical to SEQ ID NO: 340466
  chr9:139909050-139909176
  hypo
  myeloid_neoplasm vs. head_and_neck

SEQ ID NO: 472475 - DNA, 241 bp, Homo sapiens
  chr9:140379693-140379934
  hypo
  myeloid_neoplasm vs. thyroid
cggagcgactgaaaggaatgtgaggctcagagtaaaccagacaaacgctgcaggtgaggcctcatcggagtaaaccagacaaacgctgcaggtaaggcctcactggagtaaaccagacaaacgctgcaggtgaggcctcatcggagtaaaccagacaaacgctgcaggtgaggcctcatcggagtaaaccagacaaacgctgcaggtgaggcctcattggagtaaaccagacacactctcc

SEQ ID NO: 472476 - DNA, 105 bp, Homo sapiens; identical to SEQ ID NO: 365191
  chr9:140379963-140380068
  hypo
  myeloid_neoplasm vs. thyroid

SEQ ID NO: 472477 - DNA, 320 bp, Homo sapiens; identical to SEQ ID NO: 460568
  chr9:140382238-140382558
  hypo
  myeloid_neoplasm vs. upper_gi,liver_bileduct

SEQ ID NO: 472478 - DNA, 78 bp, Homo sapiens; identical to SEQ ID NO: 365193
  chr9:140382625-140382703
  hypo
  myeloid_neoplasm vs. upper_gi,liver_bileduct

SEQ ID NO: 472479 - DNA, 150 bp, Homo sapiens; identical to SEQ ID NO: 354457
  chr9:140392858-140393008
  hypo
  myeloid_neoplasm vs. anorectal,thyroid,breast

SEQ ID NO: 472480 - DNA, 189 bp, Homo sapiens; identical to SEQ ID NO: 471345
  chr9:140703858-140704047
  hypo

SEQ ID NO: 472481 - DNA, 327 bp, Homo sapiens; identical to SEQ ID NO: 345340
  chr9:140704131-140704458
  hypo

SEQ ID NO: 472482 - DNA, 90 bp, Homo sapiens; identical to SEQ ID NO: 354463
  chr9:140704673-140704763
  hypo
  myeloid_neoplasm vs. liver_bileduct,lung

SEQ ID NO: 472483 - DNA, 480 bp, Homo sapiens; identical to SEQ ID NO: 454075
  chr9:140708213-140708693
  hypo

SEQ ID NO: 472484 - DNA, 216 bp, Homo sapiens; identical to SEQ ID NO: 454076
  chr9:140708771-140708987
  hypo

SEQ ID NO: 472485 - DNA, 624 bp, Homo sapiens; identical to SEQ ID NO: 454529
  chrY:16636060-16636684
  hypo
  myeloid_neoplasm vs. breast,ovary,uterine,sarcoma, cervical,anorectal,thyroid,non_cancer

SEQ ID NO: 472486 - DNA, 949 bp, Homo sapiens; identical to SEQ ID NO: 454530
  chrY:16636193-16637142
  hypo
  myeloid_neoplasm vs. breast,ovary,uterine,cervical, anorectal,thyroid,sarcoma

SEQ ID NO: 472487 - DNA, 208 bp, Homo sapiens; identical to SEQ ID NO: 356619
  chrY:21205113-21205321
  hypo
  myeloid_neoplasm vs. breast,ovary,uterine,cervical

SEQ ID NO: 472488 - DNA, 1 bp, Homo sapiens
  chrY:22918423-22918424
  hypo
  myeloid_neoplasm vs. breast,ovary,uterine
c

SEQ ID NO: 472489 - DNA, 122 bp, Homo sapiens; identical to SEQ ID NO: 346299
  chrY:22918582-22918704
  hypo
  myeloid_neoplasm vs. breast,ovary,uterine

SEQ ID NO: 472490 - DNA, 97 bp, Homo sapiens
  NW_001838014.1_249000-295694:3973-4070
  hypo
  myeloid_neoplasm vs. lymphoid_neoplasm
cgtgtggatcccacagacagacacccttgggtggccccgaggacgcgggagaaagtcccccttcccagaccggtctcgatctcatgggatcaagtta

SEQ ID NO: 472491 - DNA, 59 bp, Homo sapiens; identical to SEQ ID NO: 464009
  chr1:1566482-1566541
  hyper
  ovary vs. anorectal,thyroid

SEQ ID NO: 472492 - DNA, 97 bp, Homo sapiens; identical to SEQ ID NO: 349142
  chr1:1566979-1567076
  hyper
  ovary vs. anorectal

SEQ ID NO: 472493 - DNA, 21 bp, Homo sapiens
  chr1:36042458-36042479
  hyper
  ovary vs. non_cancer,multiple_myeloma,renal
cgggacgcggccgcgcggact

SEQ ID NO: 472494 - DNA, 1 bp, Homo sapiens
  chr1:41284752-41284753
  hyper
  ovary vs. thyroid,multiple_myeloma,non_cancer, myeloid_neoplasm,bladder_and_urothelial
c

SEQ ID NO: 472495 - DNA, 932 bp, Homo sapiens
  chr1:46767970-46768902
  hyper
  ovary vs. lung,upper_gi,liver_bileduct,head_and_neck, pancreas_gallbladder,breast,lymphoid_neoplasm,colorectal, sarcoma,multiple_myeloma,cervical,prostate,anorectal,melanoma, myeloid_neoplasm,non_cancer
cgcctgtccgtcattcgagcctccctcgcttgtttaagccgctccgggcccccctccactcgctctccggtccctcctcgccgctcgagccgatccgagtggcctccggcgctccctgtcctgcgggtcgcacggtcgctcggtcgcttagtcagtttggcacccgagaccccggttgtcggttcgctcccgtcagccctgggccgtcagacaggccgcggcgccccgaccctttcgttcggcctctccccctgccccattccctcgctctccaatctgctgtcctcccctccgcccatcggcttggcctccggaatctcgacccccgtggcgtgtcaggcagatgctggagccccggggccatcagtcaggttcggtggccccgggcctggcctggccttgccttaggccgggcctcctaacctcggcccctgccctagggcagccgggccatcgctgcccaccggttcgacatccgagactctcctgcccggcccagccgagtgtcagttcgcgcggcccacagccgcaatccagcctcagtcgcccgggcccagcctgcttcgctccagaccgggcctcctggcctcgccccccgcgcccccgagccaggccgcggtgcgggtcagcctgcccatttaggtctccgtctttactctgtccagccctgtcagtcacaaaattcattctccgatcctacgagctggctttcagcgccccaggctgggccttgccccgggcctcccggcctcgccccccgcgccccccggccgctgggccgccccttgctcttagccagaggtagcccctcaccccgcgacttaccccacaccccgctctccagaacccccatatgggcgctcaccgcccgcccgcacagctcgaacagggcggggggagcgttggggcccgaggccgagctcttcgctggc

SEQ ID NO: 472496 - DNA, 982 bp, Homo sapiens
  chr1:46768416-46769398
  hyper
  ovary vs. lung,upper_gi,liver_bileduct,head_and_neck, pancreas_gallbladder,breast,colorectal,lymphoid_neoplasm, multiple_myeloma,sarcoma,cervical,prostate,anorectal,melanoma, non_cancer,myeloid_neoplasm,bladder_and_urothelial
cgggccatcgctgcccaccggttcgacatccgagactctcctgcccggcccagccgagtgtcagttcgcgcggcccacagccgcaatccagcctcagtcgcccgggcccagcctgcttcgctccagaccgggcctcctggcctcgccccccgcgcccccgagccaggccgcggtgcgggtcagcctgcccatttaggtctccgtctttactctgtccagccctgtcagtcacaaaattcattctccgatcctacgagctggctttcagcgccccaggctgggccttgccccgggcctcccggcctcgccccccgcgccccccggccgctgggccgccccttgctcttagccagaggtagcccctcaccccgcgacttaccccacaccccgctctccagaacccccatatgggcgctcaccgcccgcccgcacagctcgaacagggcggggggagcgttggggcccgaggccgagctcttcgctggcgccgcctcccgggacgtggcctccatggtcgttgccgccgctacctcacagaaccagcaactccgggcgcgccaggcctcgggcgccgccatcttggggaggtgcgcgagcccgagagtgtcgcccgcggaccgccatcttgaaaaggtcagcagttaggacggctccataagcgatatggggaagaatgtgaattattctaaagaaatttcgaagaaattagcacactttccaagtctcttaggagctactattttagataaactcctagatcaattatacttgggtgtggtatgactaaggggatgtttcttagcaaagcctcctcgggtgcaaacatcagctacccctaacctctgcctgcggctggtagtacatgccaatctgagcatgtgttcgcgaccacgatgagtgtgccgcacttccggccagatcgccggatttccgctgagtgacccttacaagtccttcttgatcctgaactgggttaggtgcc

SEQ ID NO: 472497 - DNA, 931 bp, Homo sapiens
  chr1:46768904-46769835
  hyper
  ovary vs. lung,upper_gi,liver_bileduct, pancreas_gallbladder,colorectal,lymphoid_neoplasm,breast, head_and_neck,multiple_myeloma,sarcoma,cervical,prostate, anorectal,melanoma,myeloid_neoplasm,non_cancer,
  CONT. FROM ABOVE: bladder_and_urothelial,thyroid
cgcctcccgggacgtggcctccatggtcgttgccgccgctacctcacagaaccagcaactccgggcgcgccaggcctcgggcgccgccatcttggggaggtgcgcgagcccgagagtgtcgcccgcggaccgccatcttgaaaaggtcagcagttaggacggctccataagcgatatggggaagaatgtgaattattctaaagaaatttcgaagaaattagcacactttccaagtctcttaggagctactattttagataaactcctagatcaattatacttgggtgtggtatgactaaggggatgtttcttagcaaagcctcctcgggtgcaaacatcagctacccctaacctctgcctgcggctggtagtacatgccaatctgagcatgtgttcgcgaccacgatgagtgtgccgcacttccggccagatcgccggatttccgctgagtgacccttacaagtccttcttgatcctgaactgggttaggtgccgctgttgctgctcgtgttgaatctagaaccgtagccagacatgggactggaggacgagcaaaagatgcttaccgaatccggagatcctgaggaggtaaggcaaggcgatccactcggccctcttctctgccctgaagcccaggacctagcccgccaaaacacgcacggggccctcttagcccccagtttaccctctagggtttgcatagtcgggagctctagttccctcgacctttccccagaattcgtccggtgactttggacagatagatgactagtttttctctgggcctcggcttctgcattctgtgaatgtagtgaaggtttgagagcgaaaatgttttgtggactaaagtcttgtaaaaatatgacctatgtttgcagtcagtcagatgttctgaagcccgcgtttcacagatttggggagcaaacagacc

SEQ ID NO: 472498 - DNA, 438 bp, Homo sapiens; identical to SEQ ID NO: 464043
  chr1:90308855-90309293
  hyper
  ovary vs. multiple_myeloma,sarcoma,cervical,melanoma, anorectal,pancreas_gallbladder,colorectal,myeloid_neoplasm, lymphoid_neoplasm,upper_gi,head_and_neck,non_cancer

SEQ ID NO: 472499 - DNA, 115 bp, Homo sapiens; identical to SEQ ID NO: 344961
  chr1:90309490-90309605
  hyper
  ovary vs. multiple_myeloma,sarcoma,cervical,melanoma, anorectal,pancreas_gallbladder,colorectal,myeloid_neoplasm, lymphoid_neoplasm,upper_gi,head_and_neck,non_cancer

SEQ ID NO: 472500 - DNA, 84 bp, Homo sapiens; identical to SEQ ID NO: 330956
  chr1:150586185-150586269
  hyper
  ovary vs. liver_bileduct,colorectal,anorectal, pancreas_gallbladder,lymphoid_neoplasm,cervical,upper_gi, multiple_myeloma,myeloid_neoplasm,prostate

SEQ ID NO: 472501 - DNA, 119 bp, Homo sapiens
  chr1:184633170-184633289
  hyper
  ovary vs. multiple_myeloma
cggctcctctacactctgcagagctgttttcccccttcagagctcctctcctccgggagggcttgcctcgccccggtccaggatctctgccttcggttgaagcgcagcgcccccagccg

SEQ ID NO: 472502 - DNA, 81 bp, Homo sapiens; identical to SEQ ID NO: 356953
  chr1:184633350-184633431
  hyper
  ovary vs. multiple_myeloma

SEQ ID NO: 472503 - DNA, 63 bp, Homo sapiens; identical to SEQ ID NO: 349387
  chr1:205400134-205400197
  hyper
  ovary vs. non_cancer,thyroid,multiple_myeloma,prostate

SEQ ID NO: 472504 - DNA, 152 bp, Homo sapiens
  chr1:219347035-219347187
  hyper
  ovary vs. pancreas_gallbladder,lymphoid_neoplasm,breast, melanoma,bladder_and_urothelial,liver_bileduct,multiple_myeloma, renal,myeloid_neoplasm,lung,thyroid,prostate,non_cancer,sarcoma, upper_gi,colorectal,head_and_neck,cervical
ttagcaaaactaaactcagtacagttacaactgcctcaaacttgaccccaaagtattgaaagctcctcagagagcgggccagcagcgctgcgcatgcgcgctcccgggcgtgctcccgcgcgtgcctgcgtatttgcgtgcgcggccccgcg

SEQ ID NO: 472505 - DNA, 55 bp, Homo sapiens; identical to SEQ ID NO: 344990
  chr1:219347516-219347571
  hyper
  ovary vs. pancreas_gallbladder,lymphoid_neoplasm,breast, melanoma,bladder_and_urothelial,liver_bileduct,multiple_myeloma, renal,myeloid_neoplasm,lung,thyroid,prostate,non_cancer,sarcoma, upper_gi,colorectal,head_and_neck,cervical

SEQ ID NO: 472506 - DNA, 4 bp, Homo sapiens
  chr1:228463167-228463171
  hyper
  ovary vs. multiple_myeloma,anorectal,thyroid,cervical, non_cancer
cgag

SEQ ID NO: 472507 - DNA, 701 bp, Homo sapiens; identical to SEQ ID NO: 470960
  chr10:43892074-43892775
  hyper
  ovary vs. pancreas_gallbladder,liver_bileduct,melanoma, anorectal,cervical,upper_gi,lymphoid_neoplasm,multiple_myeloma, thyroid,renal

SEQ ID NO: 472508 - DNA, 398 bp, Homo sapiens; identical to SEQ ID NO: 454118
  chr10:43892377-43892775
  hyper
  ovary vs. pancreas_gallbladder,cervical, lymphoid_neoplasm,melanoma,anorectal,liver_bileduct,prostate, renal,multiple_myeloma,upper_gi,non_cancer,breast

SEQ ID NO: 472509 - DNA, 171 bp, Homo sapiens; identical to SEQ ID NO: 347088
  chr10:43892970-43893141
  hyper
  ovary vs. pancreas_gallbladder,cervical, lymphoid_neoplasm,melanoma,anorectal,liver_bileduct,prostate, renal,multiple_myeloma,upper_gi,non_cancer,breast

SEQ ID NO: 472510 - DNA, 258 bp, Homo sapiens
  chr10:102585797-102586055
  hyper
  ovary vs. anorectal
taaacagaatctagtgctgatgaggaaattacacttgtttcattagcgatggggaaggagatagctcagttcctcttggtcacagttgagctcagaagctcattatcctgctgcacgcatgctttccctcctcgtcaataaacaggctttccagtggctgcatcccccacccccaccccagctccctctcagagaggggccccttctcctctacttaacccgcggttagggatcactgtaaacagtctggggtcatca

SEQ ID NO: 472511 - DNA, 109 bp, Homo sapiens; identical to SEQ ID NO: 202224
  chr10:102587493-102587602
  hyper
  ovary vs. thyroid,colorectal,breast,myeloid_neoplasm, sarcoma,non_cancer,anorectal,prostate,lung,melanoma

SEQ ID NO: 472512 - DNA, 110 bp, Homo sapiens
  chr10:102587493-102587603
  hyper
  ovary vs. breast,sarcoma,thyroid,anorectal
ccccagcctcaccccatcccacgacccccgcaacccttcacatcacccccctcgaaggtcggacaggacgggtggagccgtgggcgggaccctcaggcccgggcccgccg

SEQ ID NO: 472513 - DNA, 164 bp, Homo sapiens; identical to SEQ ID NO: 457345
  chr10:102587906-102588070
  hyper
  ovary vs. breast,sarcoma,thyroid,anorectal

SEQ ID NO: 472514 - DNA, 164 bp, Homo sapiens; identical to SEQ ID NO: 457345
  chr10:102587906-102588070
  hyper
  ovary vs. sarcoma,anorectal,myeloid_neoplasm

SEQ ID NO: 472515 - DNA, 78 bp, Homo sapiens; identical to SEQ ID NO: 457346
  chr10:102588175-102588253
  hyper
  ovary vs. sarcoma,anorectal,myeloid_neoplasm

SEQ ID NO: 472516 - DNA, 15 bp, Homo sapiens
  chr10:102588427-102588442
  hyper
  ovary vs. sarcoma,anorectal,myeloid_neoplasm
gttctgagctggcgt

SEQ ID NO: 472517 - DNA, 483 bp, Homo sapiens
  chr10:119293799-119294282
  hyper
  ovary vs. myeloid_neoplasm,multiple_myeloma,breast, prostate,lung,thyroid,colorectal
cgagaaggggaacctcaacatcaagtgtctggcagatgggagtgtgtgttaagcgagggctgttttcgttgggaacgcacagcacagctcccttcctcagagccacctccagacccctcggccctcccacgacccccagttcccgggtccgaggttctgggcgccagcggcggccaccgcgccgcgcgagcagcttttattcgcactctctttaactcgccctttctggttctcttcccttcgagcgccctgcagcggagtgttagacaagccctgttgtctgtgggctctcacctcagagtcaatattatctcagatgggcacaatagactggaatgaaaagctaatattgaatcaatgctgtccctgtccgcgccgctgcgatgccaccctttgttgcgcacgccgcccccggcaagctgctggcggccggggctaagcggagggcggccgcggtcgggcctctccgggtccacgccaggg

SEQ ID NO: 472518 - DNA, 112 bp, Homo sapiens
  chr10:119294170-119294282
  hyper
  ovary vs. multiple_myeloma,myeloid_neoplasm,breast, prostate,liver_bileduct,thyroid,lung,non_cancer
cgcgccgctgcgatgccaccctttgttgcgcacgccgcccccggcaagctgctggcggccggggctaagcggagggcggccgcggtcgggcctctccgggtccacgccaggg

SEQ ID NO: 472519 - DNA, 69 bp, Homo sapiens; identical to SEQ ID NO: 470975
  chr10:119494306-119494375
  hyper
  ovary vs. myeloid_neoplasm

SEQ ID NO: 472520 - DNA, 5 bp, Homo sapiens
  chr11:32354840-32354845
  hyper
  ovary vs. multiple_myeloma,myeloid_neoplasm
cgccc

SEQ ID NO: 472521 - DNA, 27 bp, Homo sapiens
  chr11:32355338-32355365
  hyper
  ovary vs. multiple_myeloma,myeloid_neoplasm
gctcggttcaggacgtccgggaacccc

SEQ ID NO: 472522 - DNA, 510 bp, Homo sapiens; identical to SEQ ID NO: 452797
  chr11:76381512-76382022
  hyper
  ovary vs. multiple_myeloma,myeloid_neoplasm,thyroid, non_cancer,bladder_and_urothelial,lymphoid_neoplasm

SEQ ID NO: 472523 - DNA, 30 bp, Homo sapiens; identical to SEQ ID NO: 452798
  chr11:76382264-76382294
  hyper
  ovary vs. multiple_myeloma,myeloid_neoplasm,thyroid, non_cancer,bladder_and_urothelial,lymphoid_neoplasm

SEQ ID NO: 472524 - DNA, 134 bp, Homo sapiens; identical to SEQ ID NO: 455635
  chr12:708894-709028
  hyper
  ovary vs. liver_bileduct

SEQ ID NO: 472525 - DNA, 182 bp, Homo sapiens; identical to SEQ ID NO: 351282
  chr12:709062-709244
  hyper
  ovary vs. liver_bileduct

SEQ ID NO: 472526 - DNA, 43 bp, Homo sapiens
  chr12:39298514-39298557
  hyper
  ovary vs. liver_bileduct
cgccttggcctcccaaagtgctgggaatacaggcgtataaact

SEQ ID NO: 472527 - DNA, 222 bp, Homo sapiens
  chr12:39298687-39298909
  hyper
  ovary vs. liver_bileduct
ccgaaatctctacctatcaggcaaaaggcaaaaagcccggaagggtcggggagaagcaagctggaaggctccaggaagtgggtggggaggaagctgccggggttggagccaaccctagcaacagcaggtttgcacacgcctagcagaggaagtcccgggcctaagcgtgcagcggtcacaagagcttttggcagtgctgtccccttcgattccggtcatcac

SEQ ID NO: 472528 - DNA, 16 bp, Homo sapiens
  chr12:39299102-39299118
  hyper
  ovary vs. liver_bileduct
cccactactgagatat

SEQ ID NO: 472529 - DNA, 16 bp, Homo sapiens
  chr12:39299102-39299118
  hyper
  ovary vs. liver_bileduct
cccactactgagatat

SEQ ID NO: 472530 - DNA, 86 bp, Homo sapiens; identical to SEQ ID NO: 360161
  chr12:81102562-81102648
  hyper
  ovary vs. myeloid_neoplasm,thyroid

SEQ ID NO: 472531 - DNA, 78 bp, Homo sapiens; identical to SEQ ID NO: 345463
  chr14:105512395-105512473
  hyper
  ovary vs. melanoma,head_and_neck,lymphoid_neoplasm, thyroid,colorectal,non_cancer,anorectal,myeloid_neoplasm, prostate,multiple_myeloma,sarcoma,upper_gi,renal,lung,breast, liver_bileduct,bladder_and_urothelial,pancreas_gallbladder

SEQ ID NO: 472532 - DNA, 212 bp, Homo sapiens; identical to SEQ ID NO: 345485
  chr16:3222239-3222451
  hyper
  ovary vs. non_cancer,multiple_myeloma,thyroid, myeloid_neoplasm

SEQ ID NO: 472533 - DNA, 8 bp, Homo sapiens
  chr16:68504020-68504028
  hyper
  ovary vs. anorectal,myeloid_neoplasm,prostate
cgttctgt

SEQ ID NO: 472534 - DNA, 102 bp, Homo sapiens; identical to SEQ ID NO: 345496
  chr16:68504292-68504394
  hyper
  ovary vs. anorectal,myeloid_neoplasm,prostate

SEQ ID NO: 472535 - DNA, 49 bp, Homo sapiens
  chr17:16283879-16283928
  hyper
  ovary vs. lymphoid_neoplasm,liver_bileduct,lung,upper_gi, renal,pancreas_gallbladder,breast,prostate,colorectal, myeloid_neoplasm,multiple_myeloma,non_cancer, bladder_and_urothelial,head_and_neck
cgaaactccgtctcaagaaaaaaaaggaaagaccccccctccttctccc

SEQ ID NO: 472536 - DNA, 675 bp, Homo sapiens
  chr17:16283956-16284631
  hyper
  ovary vs. lymphoid_neoplasm,liver_bileduct,lung,upper_gi, renal,pancreas_gallbladder,breast,prostate,colorectal, myeloid_neoplasm,multiple_myeloma,non_cancer, bladder_and_urothelial,head_and_neck
cgcctgtgcggcgcacgcgcgctcagttacttagcaacctcggcgctaagccaccccaggtggagcccagcaacaacagagccaccgcgtcccccaccaatcagcgccgacctcgccttcgcaggcctaaccaatcagtgccggcgctgcaaggaagtttccagagctttcgaggaaggtttcttcaactcaaattcatccgcctgataattttcttatattttcctaaagaaggaagagaagcgcatagaggagaagggaaataattttttaggagcctttcttacggctatgaggaatttggggctcagttgaaaagcctaaactgcctctcgggaggttgggcgcggcgaactactttcagcggcgcacggagacggcgtctacgtgaggggtgataagtgacgcaacactcgttgcataaatttgcgctccgccagcccggagcatttaggggcggttggctttgttgggtgagcttgtttgtgtccctgtgggtggacgtggttggtgattggcaggatcctggtatccgctaacaggtactggcccgcagccgtaacgaccttgggggggtgtgagaggggggaatgggtgaggtcaaggtggaggcttcttggggttgggtgggccgctgaggggagggcgtgggggaggggagggcgaggtgacgcg

SEQ ID NO: 472537 - DNA, 389 bp, Homo sapiens
  chr17:16284242-16284631
  hyper
  ovary vs. liver_bileduct,lung,lymphoid_neoplasm,renal, breast,prostate,upper_gi,colorectal,myeloid_neoplasm, pancreas_gallbladder,multiple_myeloma,non_cancer, bladder_and_urothelial,thyroid
cggctatgaggaatttggggctcagttgaaaagcctaaactgcctctcgggaggttgggcgcggcgaactactttcagcggcgcacggagacggcgtctacgtgaggggtgataagtgacgcaacactcgttgcataaatttgcgctccgccagcccggagcatttaggggcggttggctttgttgggtgagcttgtttgtgtccctgtgggtggacgtggttggtgattggcaggatcctggtatccgctaacaggtactggcccgcagccgtaacgaccttgggggggtgtgagaggggggaatgggtgaggtcaaggtggaggcttcttggggttgggtgggccgctgaggggagggcgtgggggaggggagggcgaggtgacgcg

SEQ ID NO: 472538 - DNA, 39 bp, Homo sapiens; identical to SEQ ID NO: 347411
  chr17:16285065-16285104
  hyper
  ovary vs. liver_bileduct,lung,lymphoid_neoplasm,renal, breast,prostate,upper_gi,colorectal,myeloid_neoplasm, pancreas_gallbladder,multiple_myeloma,non_cancer, bladder_and_urothelial,thyroid

SEQ ID NO: 472539 - DNA, 73 bp, Homo sapiens
  chr17:36204375-36204448
  hyper
  ovary vs. upper_gi,myeloid_neoplasm
cgggtgtcagtaaccaggggggccgcctgaggcgtcgcatccaacccccgcccaggtttccgccccgggccag

SEQ ID NO: 472540 - DNA, 70 bp, Homo sapiens; identical to SEQ ID NO: 374109
  chr17:36204541-36204611
  hyper
  ovary vs. upper_gi,myeloid_neoplasm

SEQ ID NO: 472541 - DNA, 80 bp, Homo sapiens; identical to SEQ ID NO: 455791
  chr17:58498618-58498698
  hyper
  ovary vs. anorectal,myeloid_neoplasm,non_cancer,thyroid, multiple_myeloma

SEQ ID NO: 472542 - DNA, 112 bp, Homo sapiens; identical to SEQ ID NO: 454237
  chr17:61777761-61777873
  hyper
  ovary vs. anorectal,cervical,multiple_myeloma,sarcoma

SEQ ID NO: 472543 - DNA, 76 bp, Homo sapiens; identical to SEQ ID NO: 345537
  chr17:61778423-61778499
  hyper
  ovary vs. anorectal,cervical,multiple_myeloma,sarcoma

SEQ ID NO: 472544 - DNA, 29 bp, Homo sapiens
  chr17:66434420-66434449
  hyper
  ovary vs. myeloid_neoplasm,colorectal,multiple_myeloma
cctggccccagccttagaagaggccactc

SEQ ID NO: 472545 - DNA, 52 bp, Homo sapiens
  chr18:3498992-3499044
  hyper
  ovary vs. myeloid_neoplasm,multiple_myeloma,non_cancer, thyroid,upper_gi,colorectal
cgggtacgggaagtggggggctgaggggggcccggggggcggctcctgcgag

SEQ ID NO: 472546 - DNA, 133 bp, Homo sapiens; identical to SEQ ID NO: 335839
  chr18:59500732-59500865
  hyper
  ovary vs. myeloid_neoplasm

SEQ ID NO: 472547 - DNA, 743 bp, Homo sapiens; identical to SEQ ID NO: 335871
  chr19:941824-942567
  hyper
  ovary vs. liver_bileduct,lung,colorectal

SEQ ID NO: 472548 - DNA, 116 bp, Homo sapiens; identical to SEQ ID NO: 452980
  chr19:10691764-10691880
  hyper
  ovary vs. multiple_myeloma,lymphoid_neoplasm,melanoma

SEQ ID NO: 472549 - DNA, 135 bp, Homo sapiens
  chr2:27304246-27304381
  hyper
  ovary vs. upper_gi
cgtggcctctggagaccgcaggtcccagcatgcagcagttcctgtggcttgccttccctcctgcgtgctgcacaccggatgtgctgtttccctgccccgagatagccttactataattatgcaaacaggaactcc

SEQ ID NO: 472550 - DNA, 64 bp, Homo sapiens; identical to SEQ ID NO: 454317
  chr2:43019535-43019599
  hyper
  ovary vs. anorectal,cervical

SEQ ID NO: 472551 - DNA, 70 bp, Homo sapiens; identical to SEQ ID NO: 346432
  chr2:43020503-43020573
  hyper
  ovary vs. myeloid_neoplasm,cervical,thyroid,anorectal

SEQ ID NO: 472552 - DNA, 397 bp, Homo sapiens; identical to SEQ ID NO: 331298
  chr2:54798152-54798549
  hyper
  ovary vs. multiple_myeloma,upper_gi,pancreas_gallbladder, colorectal,myeloid_neoplasm

SEQ ID NO: 472553 - DNA, 100 bp, Homo sapiens; identical to SEQ ID NO: 357230
  chr2:80549811-80549911
  hyper
  ovary vs. myeloid_neoplasm

SEQ ID NO: 472554 - DNA, 147 bp, Homo sapiens; identical to SEQ ID NO: 468972
  chr2:134325872-134326019
  hyper
  ovary vs. upper_gi,anorectal,colorectal,head_and_neck, cervical,bladder_and_urothelial,prostate,pancreas_gallbladder, uterine,lung,multiple_myeloma,non_cancer

SEQ ID NO: 472555 - DNA, 7 bp, Homo sapiens
  chr2:134326048-134326055
  hyper
  ovary vs. upper_gi,anorectal,colorectal,head_and_neck, cervical,bladder_and_urothelial,prostate,pancreas_gallbladder, uterine,lung,multiple_myeloma,non_cancer
aagctcc

SEQ ID NO: 472556 - DNA, 71 bp, Homo sapiens
  chr2:208635464-208635535
  hyper
  ovary vs. thyroid
cgcgcccggcccgtttacatcttaagacaagatctcactccttacaacaattctgaggcaggtacttccta

SEQ ID NO: 472557 - DNA, 129 bp, Homo sapiens; identical to SEQ ID NO: 455910
  chr2:219735657-219735786
  hyper
  ovary vs. myeloid_neoplasm,multiple_myeloma,thyroid

SEQ ID NO: 472558 - DNA, 211 bp, Homo sapiens
  chr20:9489214-9489425
  hyper
  ovary vs. myeloid_neoplasm,thyroid
tcggcagaggcttcccggggcataagaacttcaaagaaagtctcagaggagccacgctaccaggaactttcgtcgccctttaaaattgtcagatagacaagtaaaaacagtaactaactaagggaacaatggactcttgtgacatgtgtaactcttccaggtaccccaacactaaagaccccgtggttcctgtcgccatggcctgaacgta

SEQ ID NO: 472559 - DNA, 66 bp, Homo sapiens; identical to SEQ ID NO: 352456
  chr20:9489716-9489782
  hyper
  ovary vs. myeloid_neoplasm,thyroid

SEQ ID NO: 472560 - DNA, 62 bp, Homo sapiens; identical to SEQ ID NO: 453168
  chr20:30639044-30639106
  hyper
  ovary vs. multiple_myeloma,thyroid,non_cancer

SEQ ID NO: 472561 - DNA, 139 bp, Homo sapiens; identical to SEQ ID NO: 453169
  chr20:30639494-30639633
  hyper
  ovary vs. multiple_myeloma,thyroid,non_cancer

SEQ ID NO: 472562 - DNA, 165 bp, Homo sapiens
  chr20:48771177-48771342
  hyper
  ovary vs. multiple_myeloma,melanoma,lymphoid_neoplasm, non_cancer,thyroid,myeloid_neoplasm,lung,bladder_and_urothelial, prostate,breast,sarcoma,cervical,liver_bileduct,uterine, colorectal,renal,head_and_neck,pancreas_gallbladder
cgtgccaggatcggggctggaacatggtagaagctcaataaatgcttgatgaatgaattaaggctcagccagatgcgtctaatacttcggcagataaatgacagcagcagggatttaccccaggtctaaccgacaacaaagtatgcaataatttctcatagaaat

SEQ ID NO: 472563 - DNA, 130 bp, Homo sapiens; identical to SEQ ID NO: 336552
  chr21:36206762-36206892
  hyper
  ovary vs. lung,colorectal

SEQ ID NO: 472564 - DNA, 14 bp, Homo sapiens
  chr22:42354024-42354038
  hyper
  ovary vs. multiple_myeloma
gcctgggccctccc

SEQ ID NO: 472565 - DNA, 413 bp, Homo sapiens; identical to SEQ ID NO: 455963
  chr3:10206343-10206756
  hyper
  ovary vs. liver_bileduct,bladder_and_urothelial,upper_gi, pancreas_gallbladder,sarcoma,anorectal

SEQ ID NO: 472566 - DNA, 13 bp, Homo sapiens
  chr3:138679565-138679578
  hyper
  ovary vs. myeloid_neoplasm,multiple_myeloma
cgggcacagacgc

SEQ ID NO: 472567 - DNA, 347 bp, Homo sapiens; identical to SEQ ID NO: 455989
  chr3:147138422-147138769
  hyper
  ovary vs. myeloid_neoplasm

SEQ ID NO: 472568 - DNA, 84 bp, Homo sapiens; identical to SEQ ID NO: 349845
  chr3:153840393-153840477
  hyper
  ovary vs. sarcoma

SEQ ID NO: 472569 - DNA, 46 bp, Homo sapiens; identical to SEQ ID NO: 454388
  chr3:187455297-187455343
  hyper
  ovary vs. renal,multiple_myeloma,thyroid,non_cancer, sarcoma,myeloid_neoplasm,colorectal,lymphoid_neoplasm,upper_gi, lung

SEQ ID NO: 472570 - DNA, 447 bp, Homo sapiens; identical to SEQ ID NO: 454389
  chr3:187456666-187457113
  hyper
  ovary vs. multiple_myeloma,non_cancer,thyroid,sarcoma, renal,colorectal,lymphoid_neoplasm,upper_gi,myeloid_neoplasm

SEQ ID NO: 472571 - DNA, 583 bp, Homo sapiens
  chr3:195599104-195599687
  hyper
  ovary vs. uterine,bladder_and_urothelial,breast,prostate, melanoma,multiple_myeloma,non_cancer,lymphoid_neoplasm, myeloid_neoplasm,cervical,renal
cgagcggggccaggtcagcatccatccccgcccagtactcactcgtcaatcctgtccgggaagccccagcagtggcgggggtcactgtcgccatgccctgtgtggatgaagctgttctgcaggggctggctgatgtcctgggccgacaggccggccacggaggtcaccacgttgcgagggaagggccccacacacagcgtccgtgtgttctggccacgccaccagtagttctcggccctgcgcgacagagatggcacggtgaacgccaggcgtggcggggcagccccggcactgggaccctcctcacaccctggccactgtggcagaagggggatggagctcaggcctcaggaccaggctgtgtgccaccggccctcctccccaacagcccccgtgacccaccatgccccgtacaggcctgtttgcacacggccttacccacaactctctaggtgggtcaggcagctttccctatggtttgcaaataaggaggcacgctggaagctgctgcagcaggcaacatgacctgtccacggttaccagaaagatcccagcagacctgggacccaacgccagctttcag

SEQ ID NO: 472572 - DNA, 174 bp, Homo sapiens
  chr3:195599513-195599687
  hyper
  ovary vs. uterine,multiple_myeloma,prostate, bladder_and_urothelial,non_cancer,breast,melanoma, liver_bileduct,lymphoid_neoplasm
cgtacaggcctgtttgcacacggccttacccacaactctctaggtgggtcaggcagctttccctatggtttgcaaataaggaggcacgctggaagctgctgcagcaggcaacatgacctgtccacggttaccagaaagatcccagcagacctgggacccaacgccagctttcag

SEQ ID NO: 472573 - DNA, 69 bp, Homo sapiens; identical to SEQ ID NO: 349899
  chr4:1036539-1036608
  hyper
  ovary vs. prostate,thyroid,breast,uterine,non_cancer, renal,lymphoid_neoplasm

SEQ ID NO: 472574 - DNA, 89 bp, Homo sapiens; identical to SEQ ID NO: 456018
  chr5:40680875-40680964
  hyper
  ovary vs. myeloid_neoplasm,multiple_myeloma

SEQ ID NO: 472575 - DNA, 76 bp, Homo sapiens; identical to SEQ ID NO: 454408
  chr5:54518558-54518634
  hyper
  ovary vs. myeloid_neoplasm,multiple_myeloma,non_cancer, renal

SEQ ID NO: 472576 - DNA, 98 bp, Homo sapiens
  chr5:66511687-66511785
  hyper
  ovary vs. myeloid_neoplasm,breast
cgtgcccttgccctgcttcagccccacagccccgcctgggttgctggtctgacccggctgggcagggtggctgtgagctgccggtgtggccccaggca

SEQ ID NO: 472577 - DNA, 81 bp, Homo sapiens; identical to SEQ ID NO: 464605
  chr5:87955380-87955461
  hyper
  ovary vs. myeloid_neoplasm

SEQ ID NO: 472578 - DNA, 22 bp, Homo sapiens
  chr5:92906252-92906274
  hyper
  ovary vs. thyroid,myeloid_neoplasm,non_cancer, multiple_myeloma
cgccaactgcccgcgcggaacc

SEQ ID NO: 472579 - DNA, 625 bp, Homo sapiens; identical to SEQ ID NO: 456042
  chr5:142781875-142782500
  hyper
  ovary vs. multiple_myeloma

SEQ ID NO: 472580 - DNA, 78 bp, Homo sapiens; identical to SEQ ID NO: 456043
  chr5:142782625-142782703
  hyper
  ovary vs. multiple_myeloma

SEQ ID NO: 472581 - DNA, 2 bp, Homo sapiens
  chr6:10417835-10417837
  hyper
  ovary vs. breast,myeloid_neoplasm
cg

SEQ ID NO: 472582 - DNA, 227 bp, Homo sapiens; identical to SEQ ID NO: 345207
  chr6:10417842-10418069
  hyper
  ovary vs. breast,myeloid_neoplasm

SEQ ID NO: 472583 - DNA, 52 bp, Homo sapiens
  chr6:27173864-27173916
  hyper
  ovary vs. myeloid_neoplasm
aatgtttccgcctggtttcaaaccggggacctttcgcgtgtgaggcgaacgt

SEQ ID NO: 472584 - DNA, 334 bp, Homo sapiens; identical to SEQ ID NO: 454465
  chr6:106959606-106959940
  hyper
  ovary vs. pancreas_gallbladder,liver_bileduct,cervical

SEQ ID NO: 472585 - DNA, 263 bp, Homo sapiens; identical to SEQ ID NO: 454466
  chr6:106960046-106960309
  hyper
  ovary vs. pancreas_gallbladder,liver_bileduct,cervical

SEQ ID NO: 472586 - DNA, 62 bp, Homo sapiens; identical to SEQ ID NO: 454467
  chr6:106959878-106959940
  hyper
  ovary vs. anorectal,pancreas_gallbladder,thyroid, cervical,myeloid_neoplasm,head_and_neck,lymphoid_neoplasm, non_cancer,prostate,upper_gi,colorectal,renal,liver_bileduct, sarcoma

SEQ ID NO: 472587 - DNA, 263 bp, Homo sapiens; identical to SEQ ID NO: 454466
  chr6:106960046-106960309
  hyper
  ovary vs. anorectal,pancreas_gallbladder,thyroid, cervical,myeloid_neoplasm,head_and_neck,lymphoid_neoplasm, non_cancer,prostate,upper_gi,colorectal,renal,liver_bileduct, sarcoma

SEQ ID NO: 472588 - DNA, 155 bp, Homo sapiens; identical to SEQ ID NO: 345249
  chr6:106961023-106961178
  hyper
  ovary vs. myeloid_neoplasm,thyroid,non_cancer, head_and_neck,pancreas_gallbladder,lymphoid_neoplasm,prostate, renal,cervical,colorectal,upper_gi,anorectal,liver_bileduct, sarcoma

SEQ ID NO: 472589 - DNA, 333 bp, Homo sapiens; identical to SEQ ID NO: 332995
  chr7:1001822-1002155
  hyper
  ovary vs. colorectal,lung,breast,cervical,upper_gi, pancreas_gallbladder,prostate,head_and_neck,melanoma,anorectal, liver_bileduct

SEQ ID NO: 472590 - DNA, 473 bp, Homo sapiens
  chr7:95025593-95026066
  hyper
  ovary vs. liver_bileduct
cgccaggaacatctccccgactaaggacaggccgacccccagcaggaccagcgccacgagcttccccatggtctcggggtgcccagcggcgactgcgcggcgccgagagctctcgggggcgcggcgggcggttcctgcctcgcgtacggattggggcccgctcggccccgcccgcacacgcctcctacttacctgagcggcccgggtgccgcagcagggcgctgacgagtcccgccgagccccgccgcccgggttcaaggccgccttcacgcccacgattccttgttttttgggcagaggtcaaggctcaacggagagggagcccgggaccgagttgtggtgggagtttgctcctaacacccgcgaaatcctacctcaattcctcagatggcctgagggagaaaccggagggcccgggaatggcggggagctccagttcagagccggaactccggacttctgcaaggccagac

SEQ ID NO: 472591 - DNA, 55 bp, Homo sapiens
  chr7:127991607-127991662
  hyper
  ovary vs. thyroid
cgatggcgctccccaggggctccttgtctgggggcccagtgacccagcctcccgg

SEQ ID NO: 472592 - DNA, 28 bp, Homo sapiens
  chr7:155580882-155580910
  hyper
  ovary vs. melanoma
agctaaaaatccaaccaaggccgggcgc

SEQ ID NO: 472593 - DNA, 56 bp, Homo sapiens; identical to SEQ ID NO: 463080
  chr8:144328118-144328174
  hyper
  ovary vs. thyroid,non_cancer

SEQ ID NO: 472594 - DNA, 184 bp, Homo sapiens
  chr9:79629667-79629851
  hyper
  ovary vs. breast,multiple_myeloma,uterine,non_cancer, myeloid_neoplasm
cgcacagccagtaggtggcgaagctggagctcgagtatcgtctcctaaattcaaggccagtgctttttttctccaagaaataaatgcccctgacctcaggcttttcccttctgccctccaccctcgggcattccgaaaagtcaaatcgagcttatgcactcaaatccaagtagggcggagccaa

SEQ ID NO: 472595 - DNA, 55 bp, Homo sapiens
  chr9:79630437-79630492
  hyper
  ovary vs. breast,multiple_myeloma,uterine,non_cancer, myeloid_neoplasm
catggaaattgagatgtgcgcctaaacctttgccttttttctagcgctgtacgtc

SEQ ID NO: 472596 - DNA, 55 bp, Homo sapiens; identical to SEQ ID NO: 472595
  chr9:79630437-79630492
  hyper
  ovary vs. breast,myeloid_neoplasm

SEQ ID NO: 472597 - DNA, 473 bp, Homo sapiens
  chr9:79630544-79631017
  hyper
  ovary vs. breast,myeloid_neoplasm
cgcagaagccgtgggaaggcctggcctagatccagcccaaggagcgcgtgagaccctccaggggctgggggcatggaggagaaagaatgaataaataaccgctcctaaagttccacatctttttttactcccctccatagagccaattaaacgcaataaaagcttgcatggaacccctcttcctagcatagcgtcgccaacaattgcctaaggggtaaaccaaatacgcctgagataattacactaagcccggggcaatgatttgcctgccagcgtcctgagcgccagccaatatttggatagtgcagtagttgtttaaaaacaacaaaaaaaaattactcgcggaaacttgaaaccgactggttggtgccagggtggttacacgatctgtttttcttgagagggggtctgcaggcagctggagcgcgcgcgttccggcccccgccggtgccactgagcgcctgcaaaacttg

SEQ ID NO: 472598 - DNA, 473 bp, Homo sapiens; identical to SEQ ID NO: 472597
  chr9:79630544-79631017
  hyper
  ovary vs. multiple_myeloma,myeloid_neoplasm,thyroid, breast,non_cancer,uterine

SEQ ID NO: 472599 - DNA, 171 bp, Homo sapiens; identical to SEQ ID NO: 350881
  chr9:79632239-79632410
  hyper
  ovary vs. myeloid_neoplasm,multiple_myeloma,uterine, non_cancer,breast,thyroid

SEQ ID NO: 472600 - DNA, 292 bp, Homo sapiens; identical to SEQ ID NO: 467839
  chr9:79632921-79633213
  hyper
  ovary vs. multiple_myeloma,bladder_and_urothelial, uterine,myeloid_neoplasm,breast,sarcoma

SEQ ID NO: 472601 - DNA, 1 bp, Homo sapiens
  chr9:134131738-134131739
  hyper
  ovary vs. anorectal
c

SEQ ID NO: 472602 - DNA, 102 bp, Homo sapiens
  chr9:134131797-134131899
  hyper
  ovary vs. anorectal
cgtggagctcggccagcaatgcctgttatgcaatttcctgctttggtgtctcagccccaggaggcaggatgtgagcgccgttggtttgctgcaacgtggaga

SEQ ID NO: 472603 - DNA, 189 bp, Homo sapiens; identical to SEQ ID NO: 471345
  chr9:140703858-140704047
  hyper
  ovary vs. uterine,upper_gi,renal,pancreas_gallbladder, breast,lung,melanoma,colorectal,bladder_and_urothelial,cervical, liver_bileduct,head_and_neck,thyroid,prostate,non_cancer, myeloid_neoplasm

SEQ ID NO: 472604 - DNA, 327 bp, Homo sapiens; identical to SEQ ID NO: 345340
  chr9:140704131-140704458
  hyper
  ovary vs. uterine,upper_gi,renal,pancreas_gallbladder, breast,lung,melanoma,colorectal,bladder_and_urothelial,cervical, liver_bileduct,head_and_neck,thyroid,prostate,non_cancer, myeloid_neoplasm

SEQ ID NO: 472605 - DNA, 4 bp, Homo sapiens
  JH636052.4:5118715-5118719
  hyper
  ovary vs. multiple_myeloma,thyroid,non_cancer
cgcc

SEQ ID NO: 472606 - DNA, 32 bp, Homo sapiens; identical to SEQ ID NO: 336764
  chr1:1206802-1206834
  hypo
  ovary vs. lung,upper_gi,liver_bileduct

SEQ ID NO: 472607 - DNA, 395 bp, Homo sapiens
  chr1:1234784-1235179
  hypo
  ovary vs. breast,sarcoma,head_and_neck,uterine,cervical
cggctgccaactcctggtgactggtggacccgtccccaactcctggtgactggtggacccgtccccaactcctggggggctctcccctatcccaaaatagccactcctgcctgcagccaacctctgcccgggatggtggccggggctgctgtcccacaggcaagcaaaggccccgcaaggagccagtgactgaggccacagaggtgaccaccgcctcaaaaggagatcccagcagcggccccacccacacgtgcccctccactgcacacatcaaagggagcagccttggtcccctagagagggtgtgggcagggcaggtgggagacaggcaggaggaaggggcggggagggtgtgccgggcatggggtgaggacgcaggggcctcccaggcgcct

SEQ ID NO: 472608 - DNA, 607 bp, Homo sapiens; identical to SEQ ID NO: 336768
  chr1:1247740-1248347
  hypo
  ovary vs. uterine,bladder_and_urothelial,sarcoma,breast

SEQ ID NO: 472609 - DNA, 116 bp, Homo sapiens; identical to SEQ ID NO: 336769
  chr1:1253130-1253246
  hypo
  ovary vs. bladder_and_urothelial,multiple_myeloma, lymphoid_neoplasm,liver_bileduct,melanoma

SEQ ID NO: 472610 - DNA, 72 bp, Homo sapiens; identical to SEQ ID NO: 464858
  chr1:1974777-1974849
  hypo
  ovary vs. myeloid_neoplasm,lymphoid_neoplasm,thyroid

SEQ ID NO: 472611 - DNA, 162 bp, Homo sapiens; identical to SEQ ID NO: 362225
  chr1:1974925-1975087
  hypo
  ovary vs. myeloid_neoplasm,lymphoid_neoplasm,thyroid

SEQ ID NO: 472612 - DNA, 48 bp, Homo sapiens; identical to SEQ ID NO: 461368
  chr1:2331316-2331364
  hypo
  ovary vs. lung,colorectal,multiple_myeloma,cervical, upper_gi,sarcoma,pancreas_gallbladder,liver_bileduct,anorectal, lymphoid_neoplasm,melanoma,prostate,myeloid_neoplasm,non_cancer, bladder_and_urothelial,renal,breast,uterine

SEQ ID NO: 472613 - DNA, 183 bp, Homo sapiens; identical to SEQ ID NO: 345687
  chr1:2331437-2331620
  hypo
  ovary vs. lung,colorectal,multiple_myeloma,cervical, upper_gi,sarcoma,pancreas_gallbladder,liver_bileduct,anorectal, lymphoid_neoplasm,melanoma,prostate,myeloid_neoplasm,non_cancer, bladder_and_urothelial,renal,breast,uterine

SEQ ID NO: 472614 - DNA, 428 bp, Homo sapiens
  chr1:3182342-3182770
  hypo
  ovary vs. upper_gi
cgctctgtcctcaccgcccagaccctaggagcccccagaccctgcctcagtgggtcgtgcccaggtccttcgctctctatgatccctttacggtcgtgcagtgctccccagggctccgcactgctccccagggttccttggtgcgtgtctcataaagcccaggagggcgaggccaggcccagcccccaactcaagggccgccctccagcctagcgacgccacctggcccctctttccattaagtctccgtcgtcttgagtccatccagggcggtgtgcggccggtcgcttagtcagcaagaaccctgtgagctgcagtcatcataaatgcatatttaataactattttcttcctggggaaaatgtgctgcttcagaagttcagaaatgggcttcgctcttcagctggtaatgagaagttaataaaagt

SEQ ID NO: 472615 - DNA, 85 bp, Homo sapiens
  chr1:3182799-3182884
  hypo
  ovary vs. upper_gi
atcttaatctttattaaagagacgtaaacttccacggatcgggcgggcctgcctggcacagccggacgccaggagagccgggcag

SEQ ID NO: 472616 - DNA, 100 bp, Homo sapiens
  chr1:3182917-3183017
  hypo
  ovary vs. upper_gi
caccagagaacaatgcgcgccggagccttttcgccccgagagcccctcgcacttacctcagtagacgcgaattaattctctccccctgagagccccagag

SEQ ID NO: 472617 - DNA, 109 bp, Homo sapiens; identical to SEQ ID NO: 375574
  chr1:3183106-3183215
  hypo
  ovary vs. upper_gi

SEQ ID NO: 472618 - DNA, 473 bp, Homo sapiens; identical to SEQ ID NO: 336832
  chr1:3195292-3195765
  hypo
  ovary vs. anorectal,upper_gi

SEQ ID NO: 472619 - DNA, 207 bp, Homo sapiens; identical to SEQ ID NO: 336856
  chr1:3646542-3646749
  hypo
  ovary vs. uterine,bladder_and_urothelial,cervical, head_and_neck

SEQ ID NO: 472620 - DNA, 205 bp, Homo sapiens
  chr1:3680100-3680305
  hypo
  ovary vs. sarcoma,anorectal,cervical,breast,prostate, lymphoid_neoplasm
gacgcccagacgctgcctgctctggtcagtgagctggagcaggggcaggtgtcggcagcctcacccaggctggcagagccctcccagctgccgcagtggcccggccctctccttctgtccctcactgcccctgcttgctcctgctcaccgcctctgcctctgtgcccaggagtgattgcgtctttacaacaacaagtggatttcc

SEQ ID NO: 472621 - DNA, 129 bp, Homo sapiens; identical to SEQ ID NO: 352760
  chr1:3680359-3680488
  hypo
  ovary vs. sarcoma,anorectal,cervical,breast,prostate, lymphoid_neoplasm

SEQ ID NO: 472622 - DNA, 3 bp, Homo sapiens
  chr1:3683701-3683704
  hypo
  ovary vs. thyroid,breast,anorectal,prostate,renal, non_cancer
cgc

SEQ ID NO: 472623 - DNA, 174 bp, Homo sapiens
  chr1:3700211-3700385
  hypo
  ovary vs. lung,upper_gi,liver_bileduct
cgcacggtatggataaaatgctgtgggttgggctggcatttatgtctgtttcctaatggctagtttatatcctgtcctgtcccatcctgagggccacccgccccctgtggaatggccaatacctccgctcctaacaccttccacttccctcacgtcagggccatctagatgaca

SEQ ID NO: 472624 - DNA, 609 bp, Homo sapiens
  chr1:3700414-3701023
  hypo
  ovary vs. lung,upper_gi,liver_bileduct
gagaatgctttctttgtaccctgttaagaagcttctgggttctggtagcattaggcggttcctgaggagcacagactaactcagctgaggccagcatgcggcactcccccgggcccggccccaccccaccaggcacgctgcccacctgtgcaggcccgacacactctgccgcttcttctgcttcctctgctcctcggcctccagctgcagctgccgcaccagctccttggccttggcttctttccgccccaaggggacaatctatcgggcagaaacccacaaactccactagggtcacagccacagaactcgcccatcgtgtcgattacggccttaagcctcaatgagccctcccgactcccgccctcattcatctctacagcaggcagggagcatcccacgggaccacgcagcaagaagctgcatgtgggctgccactgcagcgtcccggggagacctgacgcccaaacacaccgatcctactgaggcagggcttaaccttaaagccagctcatgcacaactgtttccagaggtctgccatcctcagaaggccaaaagaggagagaaaggctgagcagccgggacctcgtgcactccacagattcaac

SEQ ID NO: 472625 - DNA, 36 bp, Homo sapiens; identical to SEQ ID NO: 362299
  chr1:3701052-3701088
  hypo
  ovary vs. lung,upper_gi,liver_bileduct

SEQ ID NO: 472626 - DNA, 72 bp, Homo sapiens
  chr1:6148944-6149016
  hypo
  ovary vs. sarcoma
cgactccacacggcatttgctgaccctgtttttgcgtctaacattgcatcgtaaacgttttttgggaggggc

SEQ ID NO: 472627 - DNA, 595 bp, Homo sapiens; identical to SEQ ID NO: 362308
  chr1:6149045-6149640
  hypo
  ovary vs. sarcoma

SEQ ID NO: 472628 - DNA, 304 bp, Homo sapiens; identical to SEQ ID NO: 336883
  chr1:6345513-6345817
  hypo
  ovary vs. head_and_neck,melanoma

SEQ ID NO: 472629 - DNA, 57 bp, Homo sapiens
  chr1:6391374-6391431
  hypo
  ovary vs. head_and_neck,liver_bileduct
cgggccctgagcccagtgacccgtactccggtaagcaggccgtgcgaagatggaggc

SEQ ID NO: 472630 - DNA, 94 bp, Homo sapiens; identical to SEQ ID NO: 362317
  chr1:6391541-6391635
  hypo
  ovary vs. head_and_neck,liver_bileduct

SEQ ID NO: 472631 - DNA, 107 bp, Homo sapiens
  chr1:6713808-6713915
  hypo
  ovary vs. head_and_neck,anorectal,pancreas_gallbladder, colorectal,upper_gi,cervical,lung,prostate,lymphoid_neoplasm, breast,bladder_and_urothelial,sarcoma,non_cancer, myeloid_neoplasm,liver_bileduct,multiple_myeloma
cggctgggaatgaagcgctttcttttttaagtggctaattgcatcctttcataaataaagatgagaaaaaccctgggcagactctcattccagctgcttggtgtgct

SEQ ID NO: 472632 - DNA, 308 bp, Homo sapiens
  chr1:6714041-6714349
  hypo
  ovary vs. head_and_neck,anorectal,pancreas_gallbladder, colorectal,upper_gi,cervical,lung,prostate,lymphoid_neoplasm, breast,bladder_and_urothelial,sarcoma,non_cancer, myeloid_neoplasm,liver_bileduct,multiple_myeloma
actcctcatcatagcgatcaaaaaggtcggtggcatctactccaacgctgatcgttccctggggcagaaaaacaagccgtcagcagaacgggtggtatttgtggaatgaaagacaatgctacacttcaacagccagctcgctttaattgaacaagtcatttgacttcagggttcactgggtttaggtaggacactccaccaggaagcccacaaagcatgaatgtcacagtccgaaccaaactgcagagcaccacagacgtccagagctagaaaacatcatttgaccaggagagccggtccgcatgtct

SEQ ID NO: 472633 - DNA, 71 bp, Homo sapiens
  chr1:9795925-9795996
  hypo
  ovary vs. upper_gi,lung,head_and_neck, pancreas_gallbladder,bladder_and_urothelial,uterine
cgagcgctcggtgttacctgcacgcctctgccactgtcttcgaggacctgcaggtccagcccctccttgca

SEQ ID NO: 472634 - DNA, 30 bp, Homo sapiens
  chr1:10091859-10091889
  hypo
cgtcagcggcaaaatctggaatttcatggt

SEQ ID NO: 472635 - DNA, 70 bp, Homo sapiens; identical to SEQ ID NO: 206650
  chr1:10091914-10091984
  hypo

SEQ ID NO: 472636 - DNA, 120 bp, Homo sapiens
  chr1:11091195-11091315
  hypo
  ovary vs. lymphoid_neoplasm,sarcoma
cgtccatgtggaggaagaggtgtgctgcctttcctagagaaagggaatttgaaaccacccagagctccttagcaccctcatgtcaaatataagaaagatctgcggccgggcgcgatggct

SEQ ID NO: 472637 - DNA, 93 bp, Homo sapiens; identical to SEQ ID NO: 347792
  chr1:12251958-12252051
  hypo
  ovary vs. renal,thyroid,non_cancer,cervical, myeloid_neoplasm,melanoma,pancreas_gallbladder,liver_bileduct, colorectal,prostate,uterine

SEQ ID NO: 472638 - DNA, 153 bp, Homo sapiens
  chr1:12460147-12460300
  hypo
  ovary vs. bladder_and_urothelial,upper_gi, pancreas_gallbladder,liver_bileduct,sarcoma,breast,colorectal, prostate,renal,non_cancer,anorectal,head_and_neck,melanoma,lung, cervical,lymphoid_neoplasm
cgcattatgaggccccactcaagcgtaaaaatgaaaactgagccactggtctgtttttgtttttgctttgctacctttccatggccgtaggtggacaatcagctcattggtaccacgcagcccttcatgctctatgtgactcccctgagcaat

SEQ ID NO: 472639 - DNA, 103 bp, Homo sapiens
  chr1:25919205-25919308
  hypo
cgctctatatccagcacctagaacagcgcctggcacctaagcaggcatttggtaaaactgtgccaaatgagtgagtgcggacagcgtcctagtccttcaccag

SEQ ID NO: 472640 - DNA, 120 bp, Homo sapiens; identical to SEQ ID NO: 362405
  chr1:25919337-25919457
  hypo

SEQ ID NO: 472641 - DNA, 140 bp, Homo sapiens; identical to SEQ ID NO: 352833
  chr1:27628429-27628569
  hypo
  ovary vs. cervical,bladder_and_urothelial,prostate, anorectal

SEQ ID NO: 472642 - DNA, 202 bp, Homo sapiens; identical to SEQ ID NO: 337000
  chr1:27921349-27921551
  hypo
  ovary vs. bladder_and_urothelial,liver_bileduct, anorectal,lung,colorectal,melanoma,uterine,upper_gi,renal, pancreas_gallbladder

SEQ ID NO: 472643 - DNA, 405 bp, Homo sapiens; identical to SEQ ID NO: 337006
  chr1:32742000-32742405
  hypo
  ovary vs. breast

SEQ ID NO: 472644 - DNA, 70 bp, Homo sapiens
  chr1:41451907-41451977
  hypo
  ovary vs. upper_gi,head_and_neck,colorectal
cggggagtctcccaagagaggccatttgagctgagaggccagtcacagcgagagtggaatgagaagtgcg

SEQ ID NO: 472645 - DNA, 15 bp, Homo sapiens
  chr1:41452012-41452027
  hypo
  ovary vs. upper_gi,head_and_neck,colorectal
aatggaggggaggcc

SEQ ID NO: 472646 - DNA, 141 bp, Homo sapiens; identical to SEQ ID NO: 459936
  chr1:44717932-44718073
  hypo
  ovary vs. liver_bileduct,anorectal,sarcoma,head_and_neck, breast,melanoma

SEQ ID NO: 472647 - DNA, 138 bp, Homo sapiens; identical to SEQ ID NO: 352856
  chr1:44718164-44718302
  hypo
  ovary vs. liver_bileduct,anorectal,sarcoma,head_and_neck, breast,melanoma

SEQ ID NO: 472648 - DNA, 335 bp, Homo sapiens; identical to SEQ ID NO: 337051
  chr1:45087586-45087921
  hypo
  ovary vs. upper_gi,bladder_and_urothelial,renal, anorectal,cervical,breast,lung,prostate,uterine,colorectal, thyroid,head_and_neck,pancreas_gallbladder

SEQ ID NO: 472649 - DNA, 209 bp, Homo sapiens; identical to SEQ ID NO: 337062
  chr1:46963465-46963674
  hypo
  ovary vs. sarcoma,breast,lymphoid_neoplasm,anorectal, bladder_and_urothelial,renal,prostate,colorectal,lung,thyroid, pancreas_gallbladder,non_cancer,melanoma,upper_gi

SEQ ID NO: 472650 - DNA, 98 bp, Homo sapiens
  chr1:47035276-47035374
  hypo
  ovary vs. lung,upper_gi,breast,bladder_and_urothelial, pancreas_gallbladder
cgattcccgactagaaggcaaaagcctggcccaggccacgggaggcacttcactaaagaagaaaaacctgagctccagcaagctcagtaacttcatca

SEQ ID NO: 472651 - DNA, 233 bp, Homo sapiens; identical to SEQ ID NO: 352862
  chr1:47035403-47035636
  hypo
  ovary vs. lung,upper_gi,breast,bladder_and_urothelial, pancreas_gallbladder

SEQ ID NO: 472652 - DNA, 148 bp, Homo sapiens; identical to SEQ ID NO: 337089
  chr1:55066953-55067101
  hypo
  ovary vs. head_and_neck,upper_gi,lung,liver_bileduct, uterine,breast,pancreas_gallbladder,bladder_and_urothelial, anorectal,colorectal

SEQ ID NO: 472653 - DNA, 438 bp, Homo sapiens; identical to SEQ ID NO: 464043
  chr1:90308855-90309293
  hypo
  ovary vs. multiple_myeloma,sarcoma,cervical,melanoma, anorectal,pancreas_gallbladder,colorectal,myeloid_neoplasm, lymphoid_neoplasm,upper_gi,head_and_neck,non_cancer

SEQ ID NO: 472654 - DNA, 179 bp, Homo sapiens
  chr1:154685569-154685748
  hypo
  ovary vs. sarcoma
cgttaccgtctggtccttgctagcatgcttcacagccgtgcaaactcaagcccaacctcaggagtccctcaatgtgcagctcataaaatgacacggaaaaggtttagtcagctcattaatttcacgcagagacacacctgagcgatttcacttaagaaacaaacaccaagtttcaaaag

SEQ ID NO: 472655 - DNA, 78 bp, Homo sapiens; identical to SEQ ID NO: 362542
  chr1:154685777-154685855
  hypo
  ovary vs. sarcoma

SEQ ID NO: 472656 - DNA, 24 bp, Homo sapiens
  chr1:155161023-155161047
  hypo
  ovary vs. head_and_neck,sarcoma,thyroid,myeloid_neoplasm
aaggcgggcctgttgtccggggcc

SEQ ID NO: 472657 - DNA, 47 bp, Homo sapiens; identical to SEQ ID NO: 375913
  chr1:155162034-155162081
  hypo
  ovary vs. anorectal

SEQ ID NO: 472658 - DNA, 187 bp, Homo sapiens; identical to SEQ ID NO: 337193
  chr1:156553606-156553793
  hypo
  ovary vs. breast

SEQ ID NO: 472659 - DNA, 287 bp, Homo sapiens; identical to SEQ ID NO: 337204
  chr1:160953524-160953811
  hypo
  ovary vs. lung,upper_gi,pancreas_gallbladder, bladder_and_urothelial

SEQ ID NO: 472660 - DNA, 181 bp, Homo sapiens; identical to SEQ ID NO: 337233
  chr1:171570080-171570261
  hypo
  ovary vs. lung,liver_bileduct

SEQ ID NO: 472661 - DNA, 131 bp, Homo sapiens; identical to SEQ ID NO: 362603
  chr1:180235795-180235926
  hypo
  ovary vs. sarcoma,cervical,anorectal

SEQ ID NO: 472662 - DNA, 203 bp, Homo sapiens; identical to SEQ ID NO: 463155
  chr1:181767556-181767759
  hypo
  ovary vs. thyroid,uterine,lymphoid_neoplasm,non_cancer

SEQ ID NO: 472663 - DNA, 85 bp, Homo sapiens; identical to SEQ ID NO: 352948
  chr1:181767807-181767892
  hypo
  ovary vs. thyroid,uterine,lymphoid_neoplasm,non_cancer

SEQ ID NO: 472664 - DNA, 388 bp, Homo sapiens; identical to SEQ ID NO: 337262
  chr1:193149436-193149824
  hypo
  ovary vs. head_and_neck

SEQ ID NO: 472665 - DNA, 329 bp, Homo sapiens; identical to SEQ ID NO: 337268
  chr1:201194921-201195250
  hypo
  ovary vs. bladder_and_urothelial,pancreas_gallbladder, colorectal,cervical

SEQ ID NO: 472666 - DNA, 292 bp, Homo sapiens; identical to SEQ ID NO: 337295
  chr1:205273331-205273623
  hypo
  ovary vs. uterine,lung,head_and_neck, bladder_and_urothelial,cervical,anorectal,liver_bileduct, melanoma

SEQ ID NO: 472667 - DNA, 221 bp, Homo sapiens; identical to SEQ ID NO: 337309
  chr1:212330215-212330436
  hypo
  ovary vs. bladder_and_urothelial,lung

SEQ ID NO: 472668 - DNA, 205 bp, Homo sapiens; identical to SEQ ID NO: 470018
  chr1:214637813-214638018
  hypo
  ovary vs. cervical,head_and_neck,bladder_and_urothelial, lung,colorectal

SEQ ID NO: 472669 - DNA, 34 bp, Homo sapiens; identical to SEQ ID NO: 352966
  chr1:214638090-214638124
  hypo
  ovary vs. cervical,head_and_neck,bladder_and_urothelial, lung,colorectal

SEQ ID NO: 472670 - DNA, 55 bp, Homo sapiens; identical to SEQ ID NO: 344990
  chr1:219347516-219347571
  hypo
  ovary vs. pancreas_gallbladder,lymphoid_neoplasm,breast, melanoma,bladder_and_urothelial,liver_bileduct,multiple_myeloma, renal,myeloid_neoplasm,lung,thyroid,prostate,non_cancer,sarcoma, upper_gi,colorectal,head_and_neck,cervical

SEQ ID NO: 472671 - DNA, 273 bp, Homo sapiens; identical to SEQ ID NO: 337366
  chr1:230256241-230256514
  hypo
  ovary vs. uterine,upper_gi,anorectal,liver_bileduct,lung, thyroid,colorectal,head_and_neck,bladder_and_urothelial, non_cancer,lymphoid_neoplasm,cervical,prostate, pancreas_gallbladder,multiple_myeloma,breast,myeloid_neoplasm

SEQ ID NO: 472672 - DNA, 262 bp, Homo sapiens; identical to SEQ ID NO: 337367
  chr1:230266303-230266565
  hypo
  ovary vs. melanoma,anorectal,liver_bileduct, pancreas_gallbladder,breast,myeloid_neoplasm,sarcoma,non_cancer, prostate,lung,cervical,bladder_and_urothelial,colorectal, upper_gi,multiple_myeloma

SEQ ID NO: 472673 - DNA, 194 bp, Homo sapiens; identical to SEQ ID NO: 459968
  chr1:230404024-230404218
  hypo
  ovary vs. lymphoid_neoplasm,multiple_myeloma,melanoma, head_and_neck,breast,myeloid_neoplasm

SEQ ID NO: 472674 - DNA, 196 bp, Homo sapiens; identical to SEQ ID NO: 352995
  chr1:230404365-230404561
  hypo
  ovary vs. lymphoid_neoplasm,multiple_myeloma,melanoma, head_and_neck,breast,myeloid_neoplasm

SEQ ID NO: 472675 - DNA, 175 bp, Homo sapiens; identical to SEQ ID NO: 337383
  chr1:233085208-233085383
  hypo
  ovary vs. lung,upper_gi,pancreas_gallbladder, liver_bileduct,renal,bladder_and_urothelial

SEQ ID NO: 472676 - DNA, 128 bp, Homo sapiens; identical to SEQ ID NO: 337406
  chr1:237052581-237052709
  hypo
  ovary vs. lung,pancreas_gallbladder,upper_gi

SEQ ID NO: 472677 - DNA, 45 bp, Homo sapiens; identical to SEQ ID NO: 337419
  chr1:244815271-244815316
  hypo
  ovary vs. liver_bileduct,pancreas_gallbladder,upper_gi, colorectal,myeloid_neoplasm,bladder_and_urothelial,thyroid, melanoma,renal

SEQ ID NO: 472678 - DNA, 443 bp, Homo sapiens
  chr1:245499151-245499594
  hypo
  ovary vs. thyroid,cervical,uterine,renal,head_and_neck, lymphoid_neoplasm,non_cancer,melanoma,prostate,sarcoma
cgaagggaaaggagggtcccacgaagggaaaggagggtcccacgcagggaaagaagagtcccacgcggggagagccccatgcagggaaagagggtcccacgcagggaaaggagagtcccacgcagggaaaggagggtcccacgcagggaaaggagagtcccacgcagggagagtcccacgcagggaaaggagggtcccacgcagggaaaggagagtcccacgcagggaaaggagggtcccacgcagggaaaggagggtcccacgcagggaaagaagagtcccacgcagggagagtcccatgcagggaaagaaggtcccacgcagggaaaggagagtcccacgcagggattgctgttccactctgcatagccgctgggctttctgctgcacggatgccatctagaagaagcaccatccactgttctcagaaagaagagagagga

SEQ ID NO: 472679 - DNA, 129 bp, Homo sapiens; identical to SEQ ID NO: 353020
  chr1:245499775-245499904
  hypo
  ovary vs. thyroid,cervical,uterine,renal,head_and_neck, lymphoid_neoplasm,non_cancer,melanoma,prostate,sarcoma

SEQ ID NO: 472680 - DNA, 105 bp, Homo sapiens; identical to SEQ ID NO: 337431
  chr1:246160284-246160389
  hypo
  ovary vs. liver_bileduct,bladder_and_urothelial,upper_gi

SEQ ID NO: 472681 - DNA, 258 bp, Homo sapiens; identical to SEQ ID NO: 340510
  chr10:851928-852186
  hypo
  ovary vs. liver_bileduct

SEQ ID NO: 472682 - DNA, 149 bp, Homo sapiens
  chr10:978663-978812
  hypo
  ovary vs. multiple_myeloma,cervical,renal, myeloid_neoplasm,prostate
cgaactcccgccccacacctgagacgaaggtcccggccccgaagtcccaaccccacacccgggaccaaggccccggcactgccccgaacccccgccccacacccctaaccaaggcctcggctcagccccggaatccccaaccccacacc

SEQ ID NO: 472683 - DNA, 357 bp, Homo sapiens; identical to SEQ ID NO: 340515
  chr10:1167479-1167836
  hypo
  ovary vs. bladder_and_urothelial,head_and_neck,anorectal, lung,breast,pancreas_gallbladder,upper_gi,renal,colorectal, melanoma,cervical

SEQ ID NO: 472684 - DNA, 102 bp, Homo sapiens; identical to SEQ ID NO: 464937
  chr10:1506151-1506253
  hypo
  ovary vs. breast,anorectal,colorectal, pancreas_gallbladder,lymphoid_neoplasm,cervical,upper_gi

SEQ ID NO: 472685 - DNA, 29 bp, Homo sapiens
  chr10:1506584-1506613
  hypo
  ovary vs. breast,anorectal,colorectal, pancreas_gallbladder,lymphoid_neoplasm,cervical,upper_gi
ggtggacacacactcccccacacacgcgc

SEQ ID NO: 472686 - DNA, 52 bp, Homo sapiens; identical to SEQ ID NO: 464939
  chr10:1558541-1558593
  hypo
  ovary vs. head_and_neck

SEQ ID NO: 472687 - DNA, 46 bp, Homo sapiens; identical to SEQ ID NO: 365235
  chr10:1558836-1558882
  hypo
  ovary vs. head_and_neck

SEQ ID NO: 472688 - DNA, 543 bp, Homo sapiens
  chr10:3121888-3122431
  hypo
  ovary vs. upper_gi,head_and_neck
cgccattgggtcttagttgtgctcctgcatcacctgcttcctagtgttggcacgggctgtgtttgatgggtaattcatccattagagtgaccatagcgtaaggtcctggaaccagagctgtgcgtccacccttcgagttgaagagtccaggcactgctgagcccagccatgggagagatgagcgaggaccttccacaggtgtgaggccaagggggcgggaggctctgtcctgccaggaataaatggaatcaggtgggaggctctgtcctgccacgaataaatggaatcaggtgggaggcaagccaggcccttttcctgggaggtgccagagccgaggaggagttggaggaggaagagcgtccgagcaagagcactggtgggactgctaccaaggttcaggaacaggagcctccgagtgctgccagacaggtgggaggtccctggggcatggccgggagctcaggggaacttgggttttcttccagtagccctgggaacctggaggaacgcggtcatattcgtgctttagaagagaacattgcc

SEQ ID NO: 472689 - DNA, 227 bp, Homo sapiens; identical to SEQ ID NO: 340531
  chr10:3194438-3194665
  hypo
  ovary vs. uterine,pancreas_gallbladder,liver_bileduct, breast,lung,upper_gi,bladder_and_urothelial,head_and_neck, colorectal,melanoma,renal

SEQ ID NO: 472690 - DNA, 115 bp, Homo sapiens
  chr10:3196890-3197005
  hypo
  ovary vs. lung,liver_bileduct,pancreas_gallbladder, head_and_neck,upper_gi,uterine,bladder_and_urothelial,breast, colorectal,lymphoid_neoplasm,sarcoma,cervical
cgtttttcgtatattctgaatacaggcctttatcagacaccatttttgcaaatgttttttcccagaggccaaactacctttgagaatccatttgggtccccttctctcccgtggc

SEQ ID NO: 472691 - DNA, 294 bp, Homo sapiens; identical to SEQ ID NO: 354490
  chr10:3197113-3197407
  hypo
  ovary vs. lung,liver_bileduct,pancreas_gallbladder, head_and_neck,upper_gi,uterine,bladder_and_urothelial,breast, colorectal,lymphoid_neoplasm,sarcoma,cervical

SEQ ID NO: 472692 - DNA, 297 bp, Homo sapiens; identical to SEQ ID NO: 354493
  chr10:3678862-3679159
  hypo
  ovary vs. melanoma

SEQ ID NO: 472693 - DNA, 70 bp, Homo sapiens; identical to SEQ ID NO: 453587
  chr10:5538706-5538776
  hypo
  ovary vs. sarcoma

SEQ ID NO: 472694 - DNA, 192 bp, Homo sapiens; identical to SEQ ID NO: 348414
  chr10:5538938-5539130
  hypo
  ovary vs. sarcoma

SEQ ID NO: 472695 - DNA, 146 bp, Homo sapiens; identical to SEQ ID NO: 471470
  chr10:6161993-6162139
  hypo
  ovary vs. multiple_myeloma

SEQ ID NO: 472696 - DNA, 297 bp, Homo sapiens; identical to SEQ ID NO: 340559
  chr10:7618377-7618674
  hypo
  ovary vs. uterine,sarcoma,head_and_neck, pancreas_gallbladder,anorectal,cervical,prostate

SEQ ID NO: 472697 - DNA, 23 bp, Homo sapiens
  chr10:13405240-13405263
  hypo
  ovary vs. head_and_neck,pancreas_gallbladder
ggaagcacacctccatgcgatgc

SEQ ID NO: 472698 - DNA, 276 bp, Homo sapiens
  chr10:13771131-13771407
  hypo
  ovary vs. bladder_and_urothelial,colorectal,melanoma, uterine,lymphoid_neoplasm,head_and_neck,prostate,cervical, breast,myeloid_neoplasm,upper_gi,liver_bileduct,renal, non_cancer,lung
cgcatggaaagcgttcaggtccactcagactgtgctgcgatctgaaagaatgataacatacgagaaggccctttggtcctacactgtgaatgagtaaggggcagctgcaaaatgctaagaatgctgagtgcattaagtgaagtgtttctcccaggtgtgcacagggtgtggcttccaaggggaatgtggatgctggaatgagggaggcagccacctaggccggtcaagtcagaggcccagcaaggagaaagcgagccaaggcaaacgccgacagaa

SEQ ID NO: 472699 - DNA, 127 bp, Homo sapiens; identical to SEQ ID NO: 354521
  chr10:13771447-13771574
  hypo
  ovary vs. bladder_and_urothelial,colorectal,melanoma, uterine,lymphoid_neoplasm,head_and_neck,prostate,cervical, breast,myeloid_neoplasm,upper_gi,liver_bileduct,renal, non_cancer,lung

SEQ ID NO: 472700 - DNA, 277 bp, Homo sapiens; identical to SEQ ID NO: 340595
  chr10:22042735-22043012
  hypo
  ovary vs. sarcoma,melanoma,colorectal, pancreas_gallbladder,renal,cervical,non_cancer,prostate, liver_bileduct,upper_gi,multiple_myeloma

SEQ ID NO: 472701 - DNA, 4 bp, Homo sapiens
  chr10:22567321-22567325
  hypo
  ovary vs. renal,thyroid
cgac

SEQ ID NO: 472702 - DNA, 211 bp, Homo sapiens; identical to SEQ ID NO: 354537
  chr10:24841853-24842064
  hypo
  ovary vs. lymphoid_neoplasm,prostate

SEQ ID NO: 472703 - DNA, 223 bp, Homo sapiens; identical to SEQ ID NO: 340607
  chr10:24863037-24863260
  hypo
  ovary vs. melanoma

SEQ ID NO: 472704 - DNA, 66 bp, Homo sapiens; identical to SEQ ID NO: 365322
  chr10:24908462-24908528
  hypo
  ovary vs. upper_gi,colorectal,pancreas_gallbladder

SEQ ID NO: 472705 - DNA, 217 bp, Homo sapiens; identical to SEQ ID NO: 354546
  chr10:44163386-44163603
  hypo
  ovary vs. pancreas_gallbladder,head_and_neck,anorectal, upper_gi,sarcoma,breast,bladder_and_urothelial,colorectal,lung, cervical,myeloid_neoplasm,prostate

SEQ ID NO: 472706 - DNA, 217 bp, Homo sapiens; identical to SEQ ID NO: 340656
  chr10:72765340-72765557
  hypo
  ovary vs. uterine,cervical,breast,thyroid,prostate

SEQ ID NO: 472707 - DNA, 238 bp, Homo sapiens; identical to SEQ ID NO: 340659
  chr10:73514960-73515198
  hypo
  ovary vs. sarcoma,anorectal,bladder_and_urothelial, cervical,pancreas_gallbladder,breast,head_and_neck,prostate, myeloid_neoplasm,non_cancer,lung,colorectal,uterine

SEQ ID NO: 472708 - DNA, 19 bp, Homo sapiens
  chr10:75384244-75384263
  hypo
  ovary vs. pancreas_gallbladder,lymphoid_neoplasm, multiple_myeloma
cgtgagtcaccgcgcccag

SEQ ID NO: 472709 - DNA, 404 bp, Homo sapiens; identical to SEQ ID NO: 340672
  chr10:76998426-76998830
  hypo
  ovary vs. upper_gi,lung,pancreas_gallbladder, bladder_and_urothelial,breast,colorectal,lymphoid_neoplasm, liver_bileduct,head_and_neck

SEQ ID NO: 472710 - DNA, 43 bp, Homo sapiens
  chr10:77892406-77892449
  hypo
  ovary vs. head_and_neck,sarcoma
cgtgtatgtttacatgtgtaggtgagcgcatgagtacgagtat

SEQ ID NO: 472711 - DNA, 113 bp, Homo sapiens
  chr10:77892478-77892591
  hypo
  ovary vs. head_and_neck,sarcoma
ctggagtccactagagagtgaaacttacagagtcttgaccattcatcattctgattctcagatttcaccagctgacaagcaccttcttttttggcggggggggtcagagtttc

SEQ ID NO: 472712 - DNA, 107 bp, Homo sapiens; identical to SEQ ID NO: 340716
  chr10:100171106-100171213
  hypo
  ovary vs. head_and_neck,lung,pancreas_gallbladder, sarcoma,colorectal,breast,upper_gi,bladder_and_urothelial, melanoma,anorectal,uterine,prostate,cervical,non_cancer

SEQ ID NO: 472713 - DNA, 43 bp, Homo sapiens
  chr10:103425908-103425951
  hypo
  ovary vs. lung,upper_gi,bladder_and_urothelial, head_and_neck,breast,pancreas_gallbladder,anorectal,melanoma, colorectal,liver_bileduct
cgctcccacacacttagcctctccactccctgctggtctttcc

SEQ ID NO: 472714 - DNA, 296 bp, Homo sapiens
  chr10:131647424-131647720
  hypo
  ovary vs. anorectal,thyroid,sarcoma,breast
cggccgggactccgtccgactgcacacactgtgtttaacaagctttataaggagccatcgggctttattatggctctgcctgactccaacaaaaactgagcctggaggcccggggacacgagttaagatgaaaatacttattggagtacattacttcttgatgtagatggcgttttccgtggagtcactccacggtgcgtggcacaacataaatcagaggtttttcggagactaataagacctgccaccatctattcattactctgcctgcaatttgggccatcactcattagtaa

SEQ ID NO: 472715 - DNA, 42 bp, Homo sapiens
  chr10:131844765-131844807
  hypo
  ovary vs. renal
gttactgcagggaattcttcataaccgaagtgtgttttcccc

SEQ ID NO: 472716 - DNA, 261 bp, Homo sapiens
  chr10:131844765-131845026
  hypo
  ovary vs. breast,lymphoid_neoplasm,melanoma, pancreas_gallbladder,renal,thyroid,prostate,sarcoma
gttactgcagggaattcttcataaccgaagtgtgttttccccgaggagttatgctaccatttgatttaatttttaatttttacattttaatcaaaaatagatcaaatggtggtggtctctccggggaaacacacttcagataggaagccggccatgctcctttaaatatggaaactgccgtctccgcgctgcgggctgggcgtgtcctttctgggaggggccttgggccatgcacctgaggccaccagctcgcccacgccg

SEQ ID NO: 472717 - DNA, 362 bp, Homo sapiens
  chr10:133982448-133982810
  hypo
  ovary vs. pancreas_gallbladder
cgggcgcaagaagggaaccgcggggacggcctttcccctcccgccctgtgtggggacgctgcacgagccgtggaccaagaggctgacaggtaagggctgccatctgtccgcggggagggcctttgcaccctccctgcgaggtgagctccagcttcttcacacctctgtgtccccgtctgcacatgcgtgacgctgccaccccgtccactgctgacccgtcaagatcacctctcccgccactgacgggacagggcctgggggctggtgtggagcgtggcgtgagctgtcgctggggcagggtctgcagacatggtgctccacggggacctggcgtctggcagagctggtcctcctcccacttg

SEQ ID NO: 472718 - DNA, 479 bp, Homo sapiens; identical to SEQ ID NO: 379465
  chr10:133982961-133983440
  hypo
  ovary vs. pancreas_gallbladder

SEQ ID NO: 472719 - DNA, 199 bp, Homo sapiens; identical to SEQ ID NO: 354619
  chr10:134477298-134477497
  hypo
  ovary vs. bladder_and_urothelial,pancreas_gallbladder, colorectal,upper_gi,liver_bileduct,renal,sarcoma,breast, prostate

SEQ ID NO: 472720 - DNA, 267 bp, Homo sapiens; identical to SEQ ID NO: 365483
  chr10:134491114-134491381
  hypo
  ovary vs. upper_gi

SEQ ID NO: 472721 - DNA, 592 bp, Homo sapiens
  chr10:134527015-134527607
  hypo
  ovary vs. lung,head_and_neck,anorectal
cgggtatatggccttggctctcctctgcatctggcccttgctgagggccctgaggcgtggccccttatcccctctgaccgcccctgacctccgtctccagagtgatggagccctggtcccctgccactagcctggtcccggggagggtggcaactgcgaggcctgggtgctgctgtgctcgtggccacacactgaggccggccctcagccctgtgcacggccacaccctctgcaggggacctgtccggcctcccggatatctctggagctggcactgacaccgaggcagggatcggtctgagcctggggactgtgctctcaactgcccaccgtagggaagcagcacaggtgggggatgggggcctggggctttgtcagcgacaaagtgactgatgaccgcctgtgccctgggcgccctccctggacagcatgtcagtcgcccagggagaagggcctcacccacaggagcggcgcggttcttcctgcctgatcagccctcggcttgcaggcaccaagcgtctcggggacctcccacggagcccaggagcagggagggccctgccgtgtctgctgttgggtcttggtgacagcg

SEQ ID NO: 472722 - DNA, 5 bp, Homo sapiens
  chr10:134527777-134527782
  hypo
  ovary vs. lung,head_and_neck,anorectal
cggcg

SEQ ID NO: 472723 - DNA, 10 bp, Homo sapiens
  chr10:134527839-134527849
  hypo
  ovary vs. lung,head_and_neck,anorectal
ccctttcacc

SEQ ID NO: 472724 - DNA, 214 bp, Homo sapiens
  chr10:134527393-134527607
  hypo
  ovary vs. lung,bladder_and_urothelial,sarcoma
cgacaaagtgactgatgaccgcctgtgccctgggcgccctccctggacagcatgtcagtcgcccagggagaagggcctcacccacaggagcggcgcggttcttcctgcctgatcagccctcggcttgcaggcaccaagcgtctcggggacctcccacggagcccaggagcagggagggccctgccgtgtctgctgttgggtcttggtgacagcg

SEQ ID NO: 472725 - DNA, 5 bp, Homo sapiens
  chr10:134527777-134527782
  hypo
  ovary vs. lung,bladder_and_urothelial,sarcoma
cggcg

SEQ ID NO: 472726 - DNA, 345 bp, Homo sapiens; identical to SEQ ID NO: 354621
  chr10:134527839-134528184
  hypo
  ovary vs. lung,bladder_and_urothelial,sarcoma

SEQ ID NO: 472727 - DNA, 418 bp, Homo sapiens
  chr10:134592912-134593330
  hypo
  ovary vs. head_and_neck,upper_gi,breast, pancreas_gallbladder,colorectal,liver_bileduct,sarcoma,cervical, lung,bladder_and_urothelial,melanoma,anorectal,prostate, lymphoid_neoplasm
cgtcggaggtcacgcgagtgcagattggtgagcagcgcccaagggcagaaggctggcagggctgtggcctccccacattgtgctgccgctgccagggctccaccagctcagagcagggcagcgttgcagcccgttttccattcactcacagcctctcgggttctctggatccgggacttgacactttatgctcagggtgggggacagagcctcacaacacacacctggcggcctttgacagcccctgccttctggggctggagtttggacaggctctccccatggggccacccagtgggcagcgggtgtgcaggacaagcagacgggcgccgggcgcgctccgcagcctcatccatcatgacacgcgccgtcacctcgtcaccaagctccgttctgcctccggagccctaaaacacca

SEQ ID NO: 472728 - DNA, 134 bp, Homo sapiens; identical to SEQ ID NO: 354625
  chr10:134593416-134593550
  hypo
  ovary vs. head_and_neck,upper_gi,breast, pancreas_gallbladder,colorectal,liver_bileduct,sarcoma,cervical, lung,bladder_and_urothelial,melanoma,anorectal,prostate, lymphoid_neoplasm

SEQ ID NO: 472729 - DNA, 118 bp, Homo sapiens
  chr10:134607715-134607833
  hypo
  ovary vs. anorectal,lymphoid_neoplasm,myeloid_neoplasm, thyroid
cgccccctgctgatgggcacctcccgacaatggcgcctcccagtgatggacgcctccacaggtcctcggggccccttcccgtccaggtcttcacagaggccccggcactgggtgccca

SEQ ID NO: 472730 - DNA, 41 bp, Homo sapiens
  chr10:134610534-134610575
  hypo
  ovary vs. sarcoma,anorectal,lymphoid_neoplasm,prostate, non_cancer
cgtcaagcatgaacctggatgtgcctggcctggtcccgggc

SEQ ID NO: 472731 - DNA, 202 bp, Homo sapiens
  chr10:134664806-134665008
  hypo
  ovary vs. sarcoma,uterine
caactgagggggtcaggcatgcctctgaagcatggaagcttctggtaagcctgaatctacatccccacaacttggatgaggcataaccgacgtaagaaactcataacaaactgcgcagatctacagtggaaaactgacacactttgatcacgaatacacccgtgaaaccatcaccaccttcgagataatgcagtagccctta

SEQ ID NO: 472732 - DNA, 165 bp, Homo sapiens
  chr10:134729798-134729963
  hypo
  ovary vs. anorectal
cgtttcctcgtagtaacagcaaactacgcctggggtcttgcgaggaacgacggctaaaaacaggagaggccacgtcaccccattttctctttcatggtctcagtcatttacgtgacgatggacacgtcccccacgcaagaagccggtgtccttacgaatgcaaag

SEQ ID NO: 472733 - DNA, 231 bp, Homo sapiens; identical to SEQ ID NO: 454633
  chr10:134733835-134734066
  hypo
  ovary vs. anorectal,renal,non_cancer,lymphoid_neoplasm

SEQ ID NO: 472734 - DNA, 133 bp, Homo sapiens; identical to SEQ ID NO: 354633
  chr10:134796042-134796175
  hypo
  ovary vs. thyroid,prostate,anorectal,lymphoid_neoplasm, renal,non_cancer

SEQ ID NO: 472735 - DNA, 121 bp, Homo sapiens; identical to SEQ ID NO: 463239
  chr10:134875690-134875811
  hypo
  ovary vs. anorectal,lymphoid_neoplasm,uterine,sarcoma, non_cancer,renal,head_and_neck,prostate,cervical,breast

SEQ ID NO: 472736 - DNA, 558 bp, Homo sapiens; identical to SEQ ID NO: 464963
  chr10:134941895-134942453
  hypo
  ovary vs. renal,thyroid

SEQ ID NO: 472737 - DNA, 306 bp, Homo sapiens; identical to SEQ ID NO: 464964
  chr10:134942147-134942453
  hypo
  ovary vs. lymphoid_neoplasm,non_cancer,renal, myeloid_neoplasm,prostate,cervical,thyroid

SEQ ID NO: 472738 - DNA, 44 bp, Homo sapiens; identical to SEQ ID NO: 379510
  chr10:134996909-134996953
  hypo
  ovary vs. renal

SEQ ID NO: 472739 - DNA, 218 bp, Homo sapiens; identical to SEQ ID NO: 365514
  chr10:135002202-135002420
  hypo
  ovary vs. lymphoid_neoplasm,thyroid,renal

SEQ ID NO: 472740 - DNA, 235 bp, Homo sapiens
  chr10:135153722-135153957
  hypo
  ovary vs. colorectal,lymphoid_neoplasm,renal, pancreas_gallbladder,thyroid,non_cancer,cervical,prostate
cgtcccctccgcctttgtgctgggtcagacccagctgggtttggctctcactcaccctgaggatggccctggcgcccgcatggtgcccagcacacagaaggcgctccataggcatttgcctgagtgcggctcccagctgtgggtggtcagcaatgacaggagcatgcgttggtgatgccttcgttttcattgctaaaccgtaacccattgttcccgctgttaactcatggacatg

SEQ ID NO: 472741 - DNA, 34 bp, Homo sapiens; identical to SEQ ID NO: 348457
  chr10:135154001-135154035
  hypo
  ovary vs. colorectal,lymphoid_neoplasm,renal, pancreas_gallbladder,thyroid,non_cancer,cervical,prostate

SEQ ID NO: 472742 - DNA, 596 bp, Homo sapiens; identical to SEQ ID NO: 340875
  chr10:135269764-135270360
  hypo
  ovary vs. head_and_neck

SEQ ID NO: 472743 - DNA, 92 bp, Homo sapiens
  chr11:487212-487304
  hypo
  ovary vs. lung,uterine,bladder_and_urothelial,renal, breast,prostate,cervical,melanoma,lymphoid_neoplasm, myeloid_neoplasm,multiple_myeloma,thyroid,liver_bileduct, non_cancer
cgtctggatggtgctcatggtgggcagggggcccctgctctctaggctgtcgtggacgtggtctccacaggccacggcagcacctgtgagtc

SEQ ID NO: 472744 - DNA, 280 bp, Homo sapiens
  chr11:487548-487828
  hypo
  ovary vs. lung,uterine,bladder_and_urothelial,renal, breast,prostate,cervical,melanoma,lymphoid_neoplasm, myeloid_neoplasm,multiple_myeloma,thyroid,liver_bileduct, non_cancer
agttgagctcagggtgctctgagtgtggtgggagggtgtcgcactgcagccacccagaggttcgagaagccgtggggctcccggacctcccagaagccctgatcctggtcgggtccccgctccgtcctcagggtcggggcggtggaaagaggcggcagggcaggaagtcccgcccctgcctgggcttgggcactgccccatcccacttctgagggaccctgtgctacctatggggctaagagcagtgcctgcttgaccctgcagcccaccctggcagagt

SEQ ID NO: 472745 - DNA, 169 bp, Homo sapiens; identical to SEQ ID NO: 348461
  chr11:487857-488026
  hypo
  ovary vs. lung,uterine,bladder_and_urothelial,renal, breast,prostate,cervical,melanoma,lymphoid_neoplasm, myeloid_neoplasm,multiple_myeloma,thyroid,liver_bileduct, non_cancer

SEQ ID NO: 472746 - DNA, 241 bp, Homo sapiens
  chr11:487587-487828
  hypo
  ovary vs. lung,uterine,renal
cgcactgcagccacccagaggttcgagaagccgtggggctcccggacctcccagaagccctgatcctggtcgggtccccgctccgtcctcagggtcggggcggtggaaagaggcggcagggcaggaagtcccgcccctgcctgggcttgggcactgccccatcccacttctgagggaccctgtgctacctatggggctaagagcagtgcctgcttgaccctgcagcccaccctggcagagt

SEQ ID NO: 472747 - DNA, 649 bp, Homo sapiens; identical to SEQ ID NO: 365535
  chr11:487857-488506
  hypo
  ovary vs. lung,uterine,renal

SEQ ID NO: 472748 - DNA, 809 bp, Homo sapiens
  chr11:488048-488857
  hypo
  ovary vs. lung,upper_gi
cgggtgggggctgcacgcacccgtgggcagggccgggcgtggccggcgtcccatactctggctgccagccggggtgggggctgcacgcacccgtgggcagggccgggtgtggccggcgtcccatactctggctgaccctggcgcccacagaccctgatgatccgagactggtggatgtgcatgatcatcagcgtgatgttcgagttcctggagtacagcctggagcaccagctgcccaacttcagcgagtgctggtgggatcacgtaggtgccagcacagcccccggggcagtcggtgcaggctgaggggcattctcggaacccctgtgcccagcgcggcccctggaccccctcattctccccggggggcagtgggtgcaggctgaggggcattctcggttcccctgtgctcttccggggtcctcctcggggggctcgttacccctcacccctgcaacgagtgctggcccctccctgcagtggatcatggacgtgctcgtctgcaacgggctgggcatctactgcggcatgaagacccttgagtggctgtccctgaagacgtacaagtggcagggcctctggaacattccgacctacaagtacgtcgtgggggctgcgagggcagggccgggtgggggttacctggaggcagcctcagcgtccgtgctccagcagaccccgagcaccaggcccgtccagtgtgcggctcaggaggggtgaccgtggggctttgcctcctggaacctccctctgacctggtgtcactcaagcccggccgcccctcacagtggccatggcgtctgacccac

SEQ ID NO: 472749 - DNA, 344 bp, Homo sapiens
  chr11:561903-562247
  hypo
  ovary vs. anorectal,lymphoid_neoplasm,cervical,melanoma, thyroid,head_and_neck,uterine,non_cancer,multiple_myeloma
cggggtcaggcaggccgggcaggtagagctgaagtgggacctggtggtccagctccatggtctcccccaaggagagtggggctggttgctgatcctttttgttcttcccaactcttcaagccaggtggacagagagtcggggggacataggctgaccttctcctcttcttcccaggccagactggccgctttgtgcttgtgcagcggcttcgggagaaggagcggcagttgctgccacaagagtgtccagtgggcgcccaggccacctgcggacagtttgccagcgatgtccagtttgtcctgaggcgcacagggcccagcctagctgggaggccctcctcaga

SEQ ID NO: 472750 - DNA, 38 bp, Homo sapiens
  chr11:562209-562247
  hypo
  ovary vs. anorectal,melanoma,cervical,head_and_neck, lymphoid_neoplasm,thyroid,uterine,non_cancer, bladder_and_urothelial,multiple_myeloma,colorectal
cgcacagggcccagcctagctgggaggccctcctcaga

SEQ ID NO: 472751 - DNA, 244 bp, Homo sapiens; identical to SEQ ID NO: 348463
  chr11:562884-563128
  hypo
  ovary vs. anorectal,melanoma,cervical,head_and_neck, lymphoid_neoplasm,thyroid,uterine,non_cancer, bladder_and_urothelial,multiple_myeloma,colorectal

SEQ ID NO: 472752 - DNA, 627 bp, Homo sapiens; identical to SEQ ID NO: 354649
  chr11:562884-563511
  hypo
  ovary vs. cervical,anorectal,uterine,colorectal, head_and_neck,bladder_and_urothelial,melanoma,non_cancer, multiple_myeloma,sarcoma,thyroid,lymphoid_neoplasm

SEQ ID NO: 472753 - DNA, 171 bp, Homo sapiens; identical to SEQ ID NO: 340889
  chr11:591108-591279
  hypo
  ovary vs. liver_bileduct,colorectal,lung,head_and_neck, uterine,upper_gi,lymphoid_neoplasm,melanoma,anorectal,renal, breast,myeloid_neoplasm,prostate,pancreas_gallbladder, bladder_and_urothelial,sarcoma,cervical,multiple_myeloma,
  CONT. FROM ABOVE: non_cancer

SEQ ID NO: 472754 - DNA, 111 bp, Homo sapiens; identical to SEQ ID NO: 464968
  chr11:763192-763303
  hypo
  ovary vs. myeloid_neoplasm,multiple_myeloma

SEQ ID NO: 472755 - DNA, 62 bp, Homo sapiens; identical to SEQ ID NO: 354654
  chr11:764018-764080
  hypo
  ovary vs. myeloid_neoplasm,multiple_myeloma

SEQ ID NO: 472756 - DNA, 137 bp, Homo sapiens
  chr11:1082528-1082665
  hypo
  ovary vs. prostate,thyroid,renal
cgccgggccacactctgcctccctgcctcactgcccgtccaccttgctctgtcgcccagaggtgcaaatatgacacgtgtaactgtcagaacaatgaggactgcctgtgcgccgccctgtcctcctacgcgcgcgcc

SEQ ID NO: 472757 - DNA, 166 bp, Homo sapiens; identical to SEQ ID NO: 365555
  chr11:1082694-1082860
  hypo
  ovary vs. prostate,thyroid,renal

SEQ ID NO: 472758 - DNA, 351 bp, Homo sapiens
  chr11:1466353-1466704
  hypo
  ovary vs. renal
cgtggcctgcgctgggtgcggggtgcgggcaggacgcaggaggcctccccgggctgggcacagggagagtggcaggatgaagggccccaggtgagggcgggcgtcccaccctcgcagccgcccaggcccggccggagctgatgagcgggtggcccgtcctgtgtccacagagggggcaagaatgagcccgaaccagagcagcccattcctcgcaaggtgcagatccgctcgctgcccagcctggaggacatcgaccccgacgtgctggacagcatgcactcactgggctgcttccgagaccgcaacaagctgctgcaggacctgctgtccgaggagtgcgtctggggctgc

SEQ ID NO: 472759 - DNA, 21 bp, Homo sapiens
  chr11:1467211-1467232
  hypo
  ovary vs. renal
tacccattggcctggggtctc

SEQ ID NO: 472760 - DNA, 21 bp, Homo sapiens
  chr11:2209823-2209844
  hypo
  ovary vs. lymphoid_neoplasm,sarcoma,non_cancer,prostate, renal
cgtaaaaaggcaactcccaga

SEQ ID NO: 472761 - DNA, 22 bp, Homo sapiens
  chr11:4095798-4095820
  hypo
  ovary vs. upper_gi,lung,uterine,head_and_neck, pancreas_gallbladder,renal,prostate,colorectal,melanoma, bladder_and_urothelial,myeloid_neoplasm,cervical, lymphoid_neoplasm,liver_bileduct,thyroid
cgcgatgagatcaaccttgcta

SEQ ID NO: 472762 - DNA, 13 bp, Homo sapiens
  chr11:4095864-4095877
  hypo
  ovary vs. upper_gi,lung,uterine,head_and_neck, pancreas_gallbladder,renal,prostate,colorectal,melanoma, bladder_and_urothelial,myeloid_neoplasm,cervical, lymphoid_neoplasm,liver_bileduct,thyroid
aatgagcggagcc

SEQ ID NO: 472763 - DNA, 156 bp, Homo sapiens; identical to SEQ ID NO: 365604
  chr11:5950927-5951083
  hypo
  ovary vs. sarcoma,cervical,lymphoid_neoplasm,anorectal

SEQ ID NO: 472764 - DNA, 68 bp, Homo sapiens; identical to SEQ ID NO: 340978
  chr11:9548334-9548402
  hypo
  ovary vs. lung

SEQ ID NO: 472765 - DNA, 302 bp, Homo sapiens; identical to SEQ ID NO: 341016
  chr11:30445742-30446044
  hypo
  ovary vs. head_and_neck,bladder_and_urothelial,anorectal, melanoma

SEQ ID NO: 472766 - DNA, 155 bp, Homo sapiens; identical to SEQ ID NO: 341033
  chr11:36476175-36476330
  hypo
  ovary vs. bladder_and_urothelial,head_and_neck,lung, uterine,lymphoid_neoplasm,breast,cervical,prostate, pancreas_gallbladder,upper_gi,sarcoma,thyroid

SEQ ID NO: 472767 - DNA, 197 bp, Homo sapiens; identical to SEQ ID NO: 341086
  chr11:63675233-63675430
  hypo
  ovary vs. bladder_and_urothelial,breast,colorectal,lung, upper_gi,cervical,pancreas_gallbladder,liver_bileduct, multiple_myeloma,anorectal,head_and_neck,uterine

SEQ ID NO: 472768 - DNA, 95 bp, Homo sapiens; identical to SEQ ID NO: 341087
  chr11:63675675-63675770
  hypo
  ovary vs. lung,liver_bileduct

SEQ ID NO: 472769 - DNA, 390 bp, Homo sapiens; identical to SEQ ID NO: 453607
  chr11:64951346-64951736
  hypo
  ovary vs. lymphoid_neoplasm,myeloid_neoplasm, multiple_myeloma,uterine

SEQ ID NO: 472770 - DNA, 190 bp, Homo sapiens; identical to SEQ ID NO: 354751
  chr11:64951894-64952084
  hypo
  ovary vs. lymphoid_neoplasm,myeloid_neoplasm, multiple_myeloma,uterine

SEQ ID NO: 472771 - DNA, 443 bp, Homo sapiens; identical to SEQ ID NO: 341113
  chr11:65123957-65124400
  hypo
  ovary vs. bladder_and_urothelial,multiple_myeloma, colorectal,anorectal,upper_gi,lymphoid_neoplasm, myeloid_neoplasm,uterine,cervical,pancreas_gallbladder

SEQ ID NO: 472772 - DNA, 559 bp, Homo sapiens; identical to SEQ ID NO: 341114
  chr11:65386927-65387486
  hypo
  ovary vs. head_and_neck,liver_bileduct,upper_gi

SEQ ID NO: 472773 - DNA, 893 bp, Homo sapiens; identical to SEQ ID NO: 354755
  chr11:65397153-65398046
  hypo
  ovary vs. lung,bladder_and_urothelial,upper_gi, liver_bileduct,head_and_neck,anorectal,colorectal,breast,renal, uterine

SEQ ID NO: 472774 - DNA, 59 bp, Homo sapiens
  chr11:65511334-65511393
  hypo
  ovary vs. melanoma,lymphoid_neoplasm
cggcagcccgtcgggagctgcagctgccaagatgcaggctgcagcgtgggagtcgcaga

SEQ ID NO: 472775 - DNA, 168 bp, Homo sapiens; identical to SEQ ID NO: 341121
  chr11:65761126-65761294
  hypo
  ovary vs. lung,pancreas_gallbladder,uterine, bladder_and_urothelial,upper_gi,head_and_neck,lymphoid_neoplasm

SEQ ID NO: 472776 - DNA, 285 bp, Homo sapiens; identical to SEQ ID NO: 464994
  chr11:66633455-66633740
  hypo
  ovary vs. liver_bileduct,head_and_neck, pancreas_gallbladder,uterine,melanoma,colorectal,renal,cervical, bladder_and_urothelial,myeloid_neoplasm

SEQ ID NO: 472777 - DNA, 185 bp, Homo sapiens; identical to SEQ ID NO: 348512
  chr11:66633833-66634018
  hypo
  ovary vs. liver_bileduct,head_and_neck, pancreas_gallbladder,uterine,melanoma,colorectal,renal,cervical, bladder_and_urothelial,myeloid_neoplasm

SEQ ID NO: 472778 - DNA, 171 bp, Homo sapiens
  chr11:69206214-69206385
  hypo
  ovary vs. melanoma,breast,pancreas_gallbladder,renal, cervical,head_and_neck,colorectal,upper_gi
cgggcgagctgaggaaaaggctcaggggctgacagatacagggactgagcgcggctaggatagccctactgagggagccagaggggccctggggagatgcctggcgggcccgtctcctagcgactgacgtcccgccaccccacgggccccttgtgctgggcactgcccacc

SEQ ID NO: 472779 - DNA, 299 bp, Homo sapiens; identical to SEQ ID NO: 354779
  chr11:69206414-69206713
  hypo
  ovary vs. melanoma,breast,pancreas_gallbladder,renal, cervical,head_and_neck,colorectal,upper_gi

SEQ ID NO: 472780 - DNA, 731 bp, Homo sapiens; identical to SEQ ID NO: 341176
  chr11:71725587-71726318
  hypo
  ovary vs. upper_gi,melanoma,head_and_neck,lung, lymphoid_neoplasm,myeloid_neoplasm,multiple_myeloma,cervical, pancreas_gallbladder,colorectal

SEQ ID NO: 472781 - DNA, 284 bp, Homo sapiens; identical to SEQ ID NO: 348518
  chr11:73685845-73686129
  hypo
  ovary vs. uterine,upper_gi,cervical,lung,head_and_neck, breast,colorectal,sarcoma,bladder_and_urothelial,renal, pancreas_gallbladder,prostate,melanoma,multiple_myeloma

SEQ ID NO: 472782 - DNA, 510 bp, Homo sapiens; identical to SEQ ID NO: 452797
  chr11:76381512-76382022
  hypo
  ovary vs. multiple_myeloma,myeloid_neoplasm,thyroid, non_cancer,bladder_and_urothelial,lymphoid_neoplasm

SEQ ID NO: 472783 - DNA, 30 bp, Homo sapiens; identical to SEQ ID NO: 452798
  chr11:76382264-76382294
  hypo
  ovary vs. multiple_myeloma,myeloid_neoplasm,thyroid, non_cancer,bladder_and_urothelial,lymphoid_neoplasm

SEQ ID NO: 472784 - DNA, 171 bp, Homo sapiens; identical to SEQ ID NO: 341224
  chr11:110144196-110144367
  hypo
  ovary vs. uterine,lung,head_and_neck,liver_bileduct

SEQ ID NO: 472785 - DNA, 238 bp, Homo sapiens; identical to SEQ ID NO: 365804
  chr11:112370546-112370784
  hypo
  ovary vs. cervical

SEQ ID NO: 472786 - DNA, 151 bp, Homo sapiens
  chr11:120998452-120998603
  hypo
  ovary vs. uterine,bladder_and_urothelial,lung,sarcoma, pancreas_gallbladder,breast,head_and_neck,lymphoid_neoplasm, colorectal,melanoma,cervical,renal,prostate,thyroid,upper_gi, non_cancer
cgcgtcagtgtccacagtgcagtgcccgagcttcagccactactccgtgtgcacaagcagctgccccgacacatgctccgacctgacggcctcgcggaactgcgccacgccgtgcacagagggctgcgagtgcaaccagggcttcgtcctc

SEQ ID NO: 472787 - DNA, 210 bp, Homo sapiens; identical to SEQ ID NO: 354823
  chr11:120998833-120999043
  hypo
  ovary vs. uterine,bladder_and_urothelial,lung,sarcoma, pancreas_gallbladder,breast,head_and_neck,lymphoid_neoplasm, colorectal,melanoma,cervical,renal,prostate,thyroid,upper_gi, non_cancer

SEQ ID NO: 472788 - DNA, 124 bp, Homo sapiens
  chr11:130781427-130781551
  hypo
  ovary vs. lung,uterine,head_and_neck, pancreas_gallbladder,sarcoma,bladder_and_urothelial,melanoma, upper_gi,breast,prostate,multiple_myeloma,anorectal, liver_bileduct,cervical,myeloid_neoplasm,colorectal,thyroid,
  CONT. FROM ABOVE: lymphoid_neoplasm,non_cancer,renal
cggcattctcctccccgatccctcccataaaccaacaggccaatcagcgtggctcgacgtgggaagcaagcgggcagtaggggttggggaaactcctgacttttgatgaactttcgtagatctg

SEQ ID NO: 472789 - DNA, 185 bp, Homo sapiens
  chr11:133703500-133703685
  hypo
  ovary vs. liver_bileduct,anorectal,sarcoma, lymphoid_neoplasm,cervical,breast,pancreas_gallbladder,renal
cgcggccgcgcggcgccctgatcgcgcgtctcaggccccgctggaacccggggcctccctgcccgctccactccttcccgcggcgcacccccgccctccgcctgcccctgccctgctggccccccgccaggcagcctctcccgcatcggagaccacccgcccggttttcatgtcccggtttggct

SEQ ID NO: 472790 - DNA, 139 bp, Homo sapiens; identical to SEQ ID NO: 365860
  chr11:133703714-133703853
  hypo
  ovary vs. liver_bileduct,anorectal,sarcoma, lymphoid_neoplasm,cervical,breast,pancreas_gallbladder,renal

SEQ ID NO: 472791 - DNA, 134 bp, Homo sapiens; identical to SEQ ID NO: 455635
  chr12:708894-709028
  hypo
  ovary vs. liver_bileduct

SEQ ID NO: 472792 - DNA, 182 bp, Homo sapiens; identical to SEQ ID NO: 351282
  chr12:709062-709244
  hypo
  ovary vs. liver_bileduct

SEQ ID NO: 472793 - DNA, 95 bp, Homo sapiens
  chr12:2017667-2017762
  hypo
  ovary vs. bladder_and_urothelial,cervical,anorectal, colorectal,head_and_neck,uterine,renal,lymphoid_neoplasm, prostate,myeloid_neoplasm,pancreas_gallbladder,non_cancer, melanoma,breast,thyroid,lung,upper_gi,sarcoma
cggcctctcccacgcggtgttggagggcgtgctaggattgcctccggtggagccccggccccgtttcctccacacgaccgggttcacacctgaac

SEQ ID NO: 472794 - DNA, 214 bp, Homo sapiens
  chr12:2017874-2018088
  hypo
  ovary vs. bladder_and_urothelial,cervical,anorectal, colorectal,head_and_neck,uterine,renal,lymphoid_neoplasm, prostate,myeloid_neoplasm,pancreas_gallbladder,non_cancer, melanoma,breast,thyroid,lung,upper_gi,sarcoma
caactcccacgccggactgcgtcacggacatccccacgccaactcccacgccggactgcctcacggacatccccacgccaactcccacgccggacagcgttatggacatccccacgccaactcccacgccggactgcgtcacggacatccccacgccaactcccacgccggactgcgtcacggacatccccacgccaactcccacgccaggttc

SEQ ID NO: 472795 - DNA, 218 bp, Homo sapiens; identical to SEQ ID NO: 341349
  chr12:6391196-6391414
  hypo
  ovary vs. breast,uterine,lung

SEQ ID NO: 472796 - DNA, 73 bp, Homo sapiens; identical to SEQ ID NO: 465020
  chr12:6483496-6483569
  hypo
  ovary vs. sarcoma

SEQ ID NO: 472797 - DNA, 267 bp, Homo sapiens; identical to SEQ ID NO: 354867
  chr12:7858581-7858848
  hypo
  ovary vs. sarcoma,renal,anorectal,melanoma, lymphoid_neoplasm,thyroid,prostate,uterine

SEQ ID NO: 472798 - DNA, 30 bp, Homo sapiens
  chr12:16034082-16034112
  hypo
  ovary vs. multiple_myeloma
cgtatttcaagttctcacgttgtttgactc

SEQ ID NO: 472799 - DNA, 221 bp, Homo sapiens; identical to SEQ ID NO: 341401
  chr12:49422776-49422997
  hypo
  ovary vs. lung,head_and_neck,upper_gi,melanoma, bladder_and_urothelial,liver_bileduct,pancreas_gallbladder, uterine,cervical

SEQ ID NO: 472800 - DNA, 104 bp, Homo sapiens; identical to SEQ ID NO: 341407
  chr12:50484317-50484421
  hypo
  ovary vs. lung,upper_gi,head_and_neck,anorectal, colorectal

SEQ ID NO: 472801 - DNA, 37 bp, Homo sapiens; identical to SEQ ID NO: 348557
  chr12:51421646-51421683
  hypo
  ovary vs. multiple_myeloma,melanoma

SEQ ID NO: 472802 - DNA, 4 bp, Homo sapiens
  chr12:51565439-51565443
  hypo
  ovary vs. head_and_neck,anorectal,myeloid_neoplasm, lymphoid_neoplasm,non_cancer,multiple_myeloma,cervical,breast
cgtg

SEQ ID NO: 472803 - DNA, 70 bp, Homo sapiens; identical to SEQ ID NO: 365963
  chr12:51844685-51844755
  hypo
  ovary vs. uterine,lung

SEQ ID NO: 472804 - DNA, 136 bp, Homo sapiens; identical to SEQ ID NO: 341435
  chr12:56183329-56183465
  hypo
  ovary vs. lung,liver_bileduct,upper_gi, pancreas_gallbladder,head_and_neck,bladder_and_urothelial, multiple_myeloma,breast,cervical,colorectal,renal,sarcoma, anorectal,lymphoid_neoplasm,melanoma,prostate,uterine

SEQ ID NO: 472805 - DNA, 360 bp, Homo sapiens
  chr12:56558022-56558382
  hypo
  ovary vs. lung,liver_bileduct,head_and_neck,uterine, upper_gi,colorectal,cervical,breast,anorectal, pancreas_gallbladder,melanoma,thyroid,bladder_and_urothelial, prostate,non_cancer,multiple_myeloma,lymphoid_neoplasm,sarcoma,
  CONT. FROM ABOVE: myeloid_neoplasm
cgctcaccctccctccaggtggacccctctccctcacccttctcccctcttggccccttctcacctggcagtgggctggcactgggcaggaggttgccctgaacagctgccacaatggcagggctttgggctgcggcggatccgagccccggcccgagaggcaaggaagatggcatggtggtggtcgccggcaggttaggatgtagagggttcgccatggacacaggcaggttaggtggggggagagtgcccggggcgaacgggagatggtggtgatgcccatgcaggttaggaggagcggggaggttaatactgatggagtcagctagactaccaaatgggatgatggatggagcagga

SEQ ID NO: 472806 - DNA, 86 bp, Homo sapiens
  chr12:108926063-108926149
  hypo
  ovary vs. liver_bileduct
cggcccggtgcagagccttccggcagtgctgggtgtcaccatgagctctaaggcagaaaacaaaaagttgctgccaccaggacaca

SEQ ID NO: 472807 - DNA, 381 bp, Homo sapiens; identical to SEQ ID NO: 380125
  chr12:108926178-108926559
  hypo
  ovary vs. liver_bileduct

SEQ ID NO: 472808 - DNA, 86 bp, Homo sapiens; identical to SEQ ID NO: 366037
  chr12:112591890-112591976
  hypo
  ovary vs. lung,upper_gi,liver_bileduct

SEQ ID NO: 472809 - DNA, 555 bp, Homo sapiens; identical to SEQ ID NO: 465041
  chr12:114273212-114273767
  hypo
  ovary vs. renal,upper_gi

SEQ ID NO: 472810 - DNA, 134 bp, Homo sapiens; identical to SEQ ID NO: 366049
  chr12:114273850-114273984
  hypo
  ovary vs. renal,upper_gi

SEQ ID NO: 472811 - DNA, 154 bp, Homo sapiens; identical to SEQ ID NO: 341531
  chr12:116756230-116756384
  hypo
  ovary vs. melanoma,multiple_myeloma

SEQ ID NO: 472812 - DNA, 273 bp, Homo sapiens
  chr12:117407834-117408107
  hypo
  ovary vs. bladder_and_urothelial,head_and_neck, liver_bileduct,upper_gi,pancreas_gallbladder
cgaaggttctgagtaatgagcagatgctgctaatgcagggacggcggagaccttgccaggactccatctgctccgtgcttgcctgcctttggcctcgtgccacagcattagggaatggcagtgtgcttcgaaacccgctccctggtcaccgagtttgtcttgaaatctcgctctttggtgagaaatgagattacacacttcttaggtgcaaagaagtttttatttgtccccctcagtagagagaggagagacgcgatctggtgcatattagca

SEQ ID NO: 472813 - DNA, 50 bp, Homo sapiens; identical to SEQ ID NO: 366064
  chr12:117408136-117408186
  hypo
  ovary vs. bladder_and_urothelial,head_and_neck, liver_bileduct,upper_gi,pancreas_gallbladder

SEQ ID NO: 472814 - DNA, 129 bp, Homo sapiens; identical to SEQ ID NO: 341537
  chr12:117408233-117408362
  hypo
  ovary vs. liver_bileduct,head_and_neck,renal,anorectal, pancreas_gallbladder

SEQ ID NO: 472815 - DNA, 293 bp, Homo sapiens; identical to SEQ ID NO: 341542
  chr12:117599154-117599447
  hypo
  ovary vs. lung

SEQ ID NO: 472816 - DNA, 328 bp, Homo sapiens; identical to SEQ ID NO: 341543
  chr12:117600052-117600380
  hypo
  ovary vs. lung,liver_bileduct,upper_gi,head_and_neck, pancreas_gallbladder,anorectal,breast

SEQ ID NO: 472817 - DNA, 397 bp, Homo sapiens; identical to SEQ ID NO: 453633
  chr12:120147746-120148143
  hypo
  ovary vs. non_cancer,multiple_myeloma,prostate,sarcoma, melanoma,myeloid_neoplasm,breast,lymphoid_neoplasm

SEQ ID NO: 472818 - DNA, 208 bp, Homo sapiens; identical to SEQ ID NO: 348569
  chr12:120148396-120148604
  hypo
  ovary vs. non_cancer,multiple_myeloma,prostate,sarcoma, melanoma,myeloid_neoplasm,breast,lymphoid_neoplasm

SEQ ID NO: 472819 - DNA, 336 bp, Homo sapiens; identical to SEQ ID NO: 465046
  chr12:120148396-120148732
  hypo
  ovary vs. sarcoma,myeloid_neoplasm,lymphoid_neoplasm, multiple_myeloma,non_cancer,melanoma

SEQ ID NO: 472820 - DNA, 70 bp, Homo sapiens; identical to SEQ ID NO: 341548
  chr12:120165264-120165334
  hypo
  ovary vs. lung,upper_gi,head_and_neck

SEQ ID NO: 472821 - DNA, 28 bp, Homo sapiens
  chr12:122208750-122208778
  hypo
  ovary vs. liver_bileduct,bladder_and_urothelial, colorectal,renal,anorectal,cervical,prostate,uterine,melanoma, lung
cgagacacatgcctgcgttgctctcccc

SEQ ID NO: 472822 - DNA, 496 bp, Homo sapiens; identical to SEQ ID NO: 354971
  chr12:122208807-122209303
  hypo
  ovary vs. liver_bileduct,bladder_and_urothelial, colorectal,renal,anorectal,cervical,prostate,uterine,melanoma, lung

SEQ ID NO: 472823 - DNA, 108 bp, Homo sapiens; identical to SEQ ID NO: 354972
  chr12:122213693-122213801
  hypo
  ovary vs. uterine,melanoma,anorectal, bladder_and_urothelial,prostate,breast,colorectal,non_cancer

SEQ ID NO: 472824 - DNA, 407 bp, Homo sapiens; identical to SEQ ID NO: 341577
  chr12:122480960-122481367
  hypo
  ovary vs. lung,upper_gi,breast,colorectal,uterine, anorectal,pancreas_gallbladder,lymphoid_neoplasm,cervical, sarcoma,prostate

SEQ ID NO: 472825 - DNA, 71 bp, Homo sapiens
  chr12:122602792-122602863
  hypo
  ovary vs. multiple_myeloma,lymphoid_neoplasm, myeloid_neoplasm,uterine,lung,breast,prostate,thyroid, bladder_and_urothelial,non_cancer
cggtttaggatttatagattgtttatttctgcaactttccatgtaatattttcagacagcggttgatcatg

SEQ ID NO: 472826 - DNA, 220 bp, Homo sapiens; identical to SEQ ID NO: 341602
  chr12:124886252-124886472
  hypo
  ovary vs. upper_gi,bladder_and_urothelial,liver_bileduct, head_and_neck

SEQ ID NO: 472827 - DNA, 178 bp, Homo sapiens; identical to SEQ ID NO: 354989
  chr12:124970986-124971164
  hypo
  ovary vs. uterine

SEQ ID NO: 472828 - DNA, 108 bp, Homo sapiens; identical to SEQ ID NO: 366131
  chr12:125092496-125092604
  hypo
  ovary vs. head_and_neck,breast

SEQ ID NO: 472829 - DNA, 237 bp, Homo sapiens; identical to SEQ ID NO: 461498
  chr12:131272094-131272331
  hypo
  ovary vs. liver_bileduct

SEQ ID NO: 472830 - DNA, 714 bp, Homo sapiens; identical to SEQ ID NO: 346068
  chr12:131272367-131273081
  hypo
  ovary vs. liver_bileduct

SEQ ID NO: 472831 - DNA, 662 bp, Homo sapiens; identical to SEQ ID NO: 454708
  chr12:131272765-131273427
  hypo
  ovary vs. liver_bileduct

SEQ ID NO: 472832 - DNA, 221 bp, Homo sapiens; identical to SEQ ID NO: 341638
  chr12:131314814-131315035
  hypo
  ovary vs. head_and_neck,anorectal,sarcoma,breast, cervical

SEQ ID NO: 472833 - DNA, 136 bp, Homo sapiens; identical to SEQ ID NO: 471610
  chr12:133280443-133280579
  hypo
  ovary vs. liver_bileduct,upper_gi,lung

SEQ ID NO: 472834 - DNA, 126 bp, Homo sapiens
  chr13:28745545-28745671
  hypo
  ovary vs. liver_bileduct,head_and_neck
cggactccagaggttaagagctcagtcacgcaagactgctctccacttcagataccagtgacatgtagcgggtcctcagattatccacacttctatccgacttggctacaaattgggagttcccac

SEQ ID NO: 472835 - DNA, 100 bp, Homo sapiens; identical to SEQ ID NO: 346075
  chr13:30123381-30123481
  hypo
  ovary vs. lung,bladder_and_urothelial,sarcoma, multiple_myeloma,breast,head_and_neck,anorectal,thyroid, prostate,lymphoid_neoplasm,myeloid_neoplasm,non_cancer,cervical, melanoma,renal,uterine,colorectal

SEQ ID NO: 472836 - DNA, 86 bp, Homo sapiens
  chr13:37643604-37643690
  hypo
  ovary vs. melanoma,non_cancer,prostate,breast, multiple_myeloma,thyroid
cggctgcagtggggaggtgcgaggggtggcagcaggaacggctgtgggagcagcagtggcggtggtgggtcccctgtgccccacgt

SEQ ID NO: 472837 - DNA, 23 bp, Homo sapiens
  chr13:46661423-46661446
  hypo
  ovary vs. liver_bileduct
gcagcagccgctctagatgggcc

SEQ ID NO: 472838 - DNA, 73 bp, Homo sapiens; identical to SEQ ID NO: 355060
  chr13:96409644-96409717
  hypo
  ovary vs. liver_bileduct,pancreas_gallbladder

SEQ ID NO: 472839 - DNA, 82 bp, Homo sapiens; identical to SEQ ID NO: 341769
  chr13:99115936-99116018
  hypo
  ovary vs. lung,uterine,pancreas_gallbladder,upper_gi, bladder_and_urothelial,colorectal,head_and_neck,liver_bileduct, anorectal,breast,renal,prostate,melanoma,multiple_myeloma, myeloid_neoplasm,cervical,lymphoid_neoplasm,non_cancer,sarcoma

SEQ ID NO: 472840 - DNA, 42 bp, Homo sapiens; identical to SEQ ID NO: 460080
  chr13:111363839-111363881
  hypo

SEQ ID NO: 472841 - DNA, 95 bp, Homo sapiens; identical to SEQ ID NO: 366278
  chr13:111978023-111978118
  hypo
  ovary vs. anorectal,cervical

SEQ ID NO: 472842 - DNA, 4 bp, Homo sapiens
  chr13:113107708-113107712
  hypo
  ovary vs. anorectal
cgga

SEQ ID NO: 472843 - DNA, 193 bp, Homo sapiens; identical to SEQ ID NO: 341805
  chr13:113233687-113233880
  hypo
  ovary vs. liver_bileduct,head_and_neck

SEQ ID NO: 472844 - DNA, 282 bp, Homo sapiens; identical to SEQ ID NO: 341809
  chr13:113291506-113291788
  hypo
  ovary vs. lung,cervical

SEQ ID NO: 472845 - DNA, 183 bp, Homo sapiens; identical to SEQ ID NO: 341817
  chr13:113461159-113461342
  hypo
  ovary vs. uterine,upper_gi,cervical,pancreas_gallbladder, colorectal

SEQ ID NO: 472846 - DNA, 19 bp, Homo sapiens
  chr13:113598851-113598870
  hypo
  ovary vs. bladder_and_urothelial,cervical,uterine, melanoma,colorectal,renal,anorectal,pancreas_gallbladder, thyroid,non_cancer
aatctgtcagtcctgtccc

SEQ ID NO: 472847 - DNA, 319 bp, Homo sapiens; identical to SEQ ID NO: 341824
  chr13:113627865-113628184
  hypo
  ovary vs. pancreas_gallbladder,cervical

SEQ ID NO: 472848 - DNA, 241 bp, Homo sapiens; identical to SEQ ID NO: 341827
  chr13:113796043-113796284
  hypo
  ovary vs. uterine,sarcoma,liver_bileduct,lung

SEQ ID NO: 472849 - DNA, 178 bp, Homo sapiens; identical to SEQ ID NO: 470175
  chr13:113797753-113797931
  hypo
  ovary vs. head_and_neck,liver_bileduct, pancreas_gallbladder,upper_gi,breast,melanoma,prostate, anorectal,colorectal,lung,lymphoid_neoplasm,thyroid,uterine, sarcoma,renal,non_cancer,cervical,bladder_and_urothelial

SEQ ID NO: 472850 - DNA, 112 bp, Homo sapiens; identical to SEQ ID NO: 348614
  chr13:113797960-113798072
  hypo
  ovary vs. head_and_neck,liver_bileduct, pancreas_gallbladder,upper_gi,breast,melanoma,prostate, anorectal,colorectal,lung,lymphoid_neoplasm,thyroid,uterine, sarcoma,renal,non_cancer,cervical,bladder_and_urothelial

SEQ ID NO: 472851 - DNA, 280 bp, Homo sapiens
  chr13:114055661-114055941
  hypo
cgtgtgcttcgtgagagaggggaccctgtcctcctagcaggggtccagcggcaccacagcaagacttctgtggccaagtacacgccatgctcagctctgcccccacccgcacccccggaccatcctgtgtgcagctgggctgccccgggacccacacgcgcgaggggcacccggtgctcaggagcctccacacacagcagctcgcacttagaacccacacgccaagcagaaacccctcgaagcgggctgggagcacggacccctgatttatagaggaggc

SEQ ID NO: 472852 - DNA, 358 bp, Homo sapiens
  chr13:114056151-114056509
  hypo
gccactggcgtctgccgggatggaccttccctggaaggagagacctcagccccgcgtgggtaggacgcgcctgctgaacgccctctcagggccgacactggaaaacaccttcctctaaaggaacatccgagtcagaaaacaggtgctcgcagcaggcaccaaagcgcctttgcgaacgcttagggctgtttcaggaaaccgctcagtagcaaaggcagaagatgccaagacaccttcaaaaagcaggaattaactttccacagggagggcaccaccaaaaacaagggtgcggggctgtagggcgacaggctgcatcggttcacgctgaaaatccagctgctccggggccactcaggca

SEQ ID NO: 472853 - DNA, 32 bp, Homo sapiens; identical to SEQ ID NO: 366315
  chr13:114056544-114056576
  hypo

SEQ ID NO: 472854 - DNA, 163 bp, Homo sapiens; identical to SEQ ID NO: 355095
  chr13:114123291-114123454
  hypo
  ovary vs. melanoma

SEQ ID NO: 472855 - DNA, 162 bp, Homo sapiens; identical to SEQ ID NO: 465091
  chr13:114271763-114271925
  hypo
  ovary vs. melanoma,sarcoma,breast,renal,non_cancer, bladder_and_urothelial,multiple_myeloma,cervical,prostate, uterine,pancreas_gallbladder,colorectal,anorectal,head_and_neck, liver_bileduct,lymphoid_neoplasm,upper_gi

SEQ ID NO: 472856 - DNA, 62 bp, Homo sapiens
  chr13:114502726-114502788
  hypo
  ovary vs. sarcoma,lymphoid_neoplasm,non_cancer,prostate
cgagaaacttctggatttccctgagccaccgacagcggcagtgtgacctcatttctctttcc

SEQ ID NO: 472857 - DNA, 74 bp, Homo sapiens; identical to SEQ ID NO: 341863
  chr13:114747445-114747519
  hypo
  ovary vs. anorectal,renal

SEQ ID NO: 472858 - DNA, 139 bp, Homo sapiens; identical to SEQ ID NO: 454748
  chr13:114748186-114748325
  hypo
  ovary vs. melanoma,thyroid,non_cancer,renal,prostate, lymphoid_neoplasm,breast,myeloid_neoplasm,pancreas_gallbladder, multiple_myeloma

SEQ ID NO: 472859 - DNA, 98 bp, Homo sapiens
  chr13:114766173-114766271
  hypo
  ovary vs. cervical
cgcggccccgggctctgcccgcagcactgaatccttcctcccctcagctctccccctgaaaaagcagactcagtcccagggcccagcacgctccagca

SEQ ID NO: 472860 - DNA, 82 bp, Homo sapiens; identical to SEQ ID NO: 380514
  chr13:114766300-114766382
  hypo
  ovary vs. cervical

SEQ ID NO: 472861 - DNA, 56 bp, Homo sapiens; identical to SEQ ID NO: 458616
  chr14:32597657-32597713
  hypo
  ovary vs. uterine

SEQ ID NO: 472862 - DNA, 86 bp, Homo sapiens
  chr14:53259056-53259142
  hypo
  ovary vs. head_and_neck,cervical,thyroid
cgggaatactgcttcacgccttacagtgcgcaggacagcgccgcacaacaaagaattacctggcctgaaatgtctggagtgctgag

SEQ ID NO: 472863 - DNA, 297 bp, Homo sapiens; identical to SEQ ID NO: 456486
  chr14:55765714-55766011
  hypo
  ovary vs. liver_bileduct,multiple_myeloma

SEQ ID NO: 472864 - DNA, 55 bp, Homo sapiens; identical to SEQ ID NO: 346085
  chr14:55766084-55766139
  hypo
  ovary vs. liver_bileduct,multiple_myeloma

SEQ ID NO: 472865 - DNA, 211 bp, Homo sapiens; identical to SEQ ID NO: 341947
  chr14:69354686-69354897
  hypo
  ovary vs. uterine,colorectal,lung,upper_gi, bladder_and_urothelial,melanoma,pancreas_gallbladder, lymphoid_neoplasm,prostate,anorectal

SEQ ID NO: 472866 - DNA, 82 bp, Homo sapiens; identical to SEQ ID NO: 341978
  chr14:89291884-89291966
  hypo
  ovary vs. head_and_neck

SEQ ID NO: 472867 - DNA, 857 bp, Homo sapiens; identical to SEQ ID NO: 355160
  chr14:91805557-91806414
  hypo
  ovary vs. head_and_neck,lung,pancreas_gallbladder, uterine,breast,colorectal,upper_gi,cervical

SEQ ID NO: 472868 - DNA, 523 bp, Homo sapiens; identical to SEQ ID NO: 342005
  chr14:93454179-93454702
  hypo
  ovary vs. uterine

SEQ ID NO: 472869 - DNA, 81 bp, Homo sapiens; identical to SEQ ID NO: 342012
  chr14:96054940-96055021
  hypo
  ovary vs. thyroid

SEQ ID NO: 472870 - DNA, 17 bp, Homo sapiens
  chr14:100843925-100843942
  hypo
  ovary vs. sarcoma,multiple_myeloma
cgtgagccaccgcgccc

SEQ ID NO: 472871 - DNA, 119 bp, Homo sapiens; identical to SEQ ID NO: 355186
  chr14:102691860-102691979
  hypo
  ovary vs. lung,liver_bileduct,upper_gi,head_and_neck

SEQ ID NO: 472872 - DNA, 22 bp, Homo sapiens
  chr14:103216371-103216393
  hypo
  ovary vs. sarcoma,breast,cervical,anorectal
cggtccccgcggcctcggtccc

SEQ ID NO: 472873 - DNA, 365 bp, Homo sapiens; identical to SEQ ID NO: 342061
  chr14:103409913-103410278
  hypo
  ovary vs. upper_gi,bladder_and_urothelial,lung, pancreas_gallbladder,colorectal

SEQ ID NO: 472874 - DNA, 129 bp, Homo sapiens; identical to SEQ ID NO: 342062
  chr14:103417432-103417561
  hypo
  ovary vs. lung,upper_gi

SEQ ID NO: 472875 - DNA, 140 bp, Homo sapiens; identical to SEQ ID NO: 454790
  chr14:104641166-104641306
  hypo
  ovary vs. myeloid_neoplasm,thyroid,cervical,non_cancer, prostate,colorectal,renal,uterine,breast

SEQ ID NO: 472876 - DNA, 212 bp, Homo sapiens; identical to SEQ ID NO: 470194
  chr14:104642243-104642455
  hypo
  ovary vs. cervical,anorectal

SEQ ID NO: 472877 - DNA, 119 bp, Homo sapiens; identical to SEQ ID NO: 366513
  chr14:104642742-104642861
  hypo
  ovary vs. cervical,anorectal

SEQ ID NO: 472878 - DNA, 80 bp, Homo sapiens
  chr14:104645047-104645127
  hypo
  ovary vs. myeloid_neoplasm
cgccttcagcggccccgccccaccccgagggaggcccccacccaggtagggcctttggtgggctggggtctatgacccct

SEQ ID NO: 472879 - DNA, 164 bp, Homo sapiens; identical to SEQ ID NO: 470196
  chr14:104645553-104645717
  hypo
  ovary vs. myeloid_neoplasm,lymphoid_neoplasm,non_cancer, renal,anorectal,prostate,cervical

SEQ ID NO: 472880 - DNA, 3 bp, Homo sapiens
  chr14:104646706-104646709
  hypo
  ovary vs. lymphoid_neoplasm,anorectal,myeloid_neoplasm, non_cancer,renal,prostate,cervical,pancreas_gallbladder, colorectal,thyroid,head_and_neck,uterine,breast
ccc

SEQ ID NO: 472881 - DNA, 244 bp, Homo sapiens; identical to SEQ ID NO: 380731
  chr14:105103508-105103752
  hypo
  ovary vs. thyroid

SEQ ID NO: 472882 - DNA, 65 bp, Homo sapiens
  chr14:105268589-105268654
  hypo
  ovary vs. bladder_and_urothelial,uterine
cgagcggacacactcgggtgagaagccctatacgtgtgtgcagtgtggcaaaagttttcagtact

SEQ ID NO: 472883 - DNA, 640 bp, Homo sapiens; identical to SEQ ID NO: 342110
  chr14:105687735-105688375
  hypo
  ovary vs. pancreas_gallbladder,bladder_and_urothelial, head_and_neck,upper_gi,sarcoma,multiple_myeloma,renal,melanoma, anorectal,colorectal,breast,cervical,lymphoid_neoplasm, liver_bileduct,lung,thyroid,non_cancer,myeloid_neoplasm

SEQ ID NO: 472884 - DNA, 423 bp, Homo sapiens; identical to SEQ ID NO: 465137
  chr14:105689521-105689944
  hypo
  ovary vs. breast,lymphoid_neoplasm,myeloid_neoplasm, prostate,multiple_myeloma,non_cancer,sarcoma,colorectal, melanoma,cervical,liver_bileduct,upper_gi

SEQ ID NO: 472885 - DNA, 116 bp, Homo sapiens
  chr15:28516961-28517077
  hypo
  ovary vs. breast
cgcacgcctgctcctccctcagcttgttgtccacacctgttaaggcgggagctggtaccaaacagagtgacagctcaggtgacgtgccctgcacagagcccagtacataggaagga

SEQ ID NO: 472886 - DNA, 177 bp, Homo sapiens; identical to SEQ ID NO: 346096
  chr15:28517198-28517375
  hypo
  ovary vs. breast

SEQ ID NO: 472887 - DNA, 136 bp, Homo sapiens; identical to SEQ ID NO: 355237
  chr15:31571220-31571356
  hypo
  ovary vs. uterine,liver_bileduct,upper_gi

SEQ ID NO: 472888 - DNA, 88 bp, Homo sapiens; identical to SEQ ID NO: 458640
  chr15:41091052-41091140
  hypo
  ovary vs. lymphoid_neoplasm

SEQ ID NO: 472889 - DNA, 234 bp, Homo sapiens; identical to SEQ ID NO: 355246
  chr15:43020360-43020594
  hypo
  ovary vs. uterine,head_and_neck,upper_gi, pancreas_gallbladder,colorectal,liver_bileduct, lymphoid_neoplasm,renal,bladder_and_urothelial

SEQ ID NO: 472890 - DNA, 563 bp, Homo sapiens; identical to SEQ ID NO: 355247
  chr15:45444141-45444704
  hypo
  ovary vs. liver_bileduct,upper_gi,uterine,lung, head_and_neck,pancreas_gallbladder,bladder_and_urothelial, cervical,breast,anorectal,colorectal

SEQ ID NO: 472891 - DNA, 290 bp, Homo sapiens; identical to SEQ ID NO: 342174
  chr15:49698682-49698972
  hypo
  ovary vs. uterine

SEQ ID NO: 472892 - DNA, 153 bp, Homo sapiens; identical to SEQ ID NO: 342203
  chr15:63066085-63066238
  hypo
  ovary vs. melanoma

SEQ ID NO: 472893 - DNA, 102 bp, Homo sapiens; identical to SEQ ID NO: 366620
  chr15:68908928-68909030
  hypo
  ovary vs. cervical,upper_gi,bladder_and_urothelial, prostate,thyroid

SEQ ID NO: 472894 - DNA, 204 bp, Homo sapiens
  chr15:72462436-72462640
  hypo
  ovary vs. sarcoma,uterine
cgcaggcagaggttctgggatggctgacggagtaggcgggtctcacacagcgtctttcccgaaagccagaagttctgcttatgcctaggctgggaggaaaatcaacctgtctacctcatctccagtgccaggcagctcgtaggccaggctgagtgaggcctctagccccacccttgaggaggcacactgagagggaggaccctg

SEQ ID NO: 472895 - DNA, 114 bp, Homo sapiens; identical to SEQ ID NO: 366630
  chr15:72462669-72462783
  hypo
  ovary vs. sarcoma,uterine

SEQ ID NO: 472896 - DNA, 235 bp, Homo sapiens; identical to SEQ ID NO: 342287
  chr15:93179848-93180083
  hypo
  ovary vs. melanoma

SEQ ID NO: 472897 - DNA, 351 bp, Homo sapiens; identical to SEQ ID NO: 342291
  chr15:94048797-94049148
  hypo
  ovary vs. head_and_neck

SEQ ID NO: 472898 - DNA, 353 bp, Homo sapiens; identical to SEQ ID NO: 342293
  chr15:94881658-94882011
  hypo
  ovary vs. uterine,anorectal,bladder_and_urothelial, cervical,lung,head_and_neck,prostate,colorectal,renal

SEQ ID NO: 472899 - DNA, 86 bp, Homo sapiens; identical to SEQ ID NO: 463393
  chr15:99506062-99506148
  hypo
  ovary vs. bladder_and_urothelial,head_and_neck,sarcoma, cervical,lung,melanoma,breast,renal,anorectal, pancreas_gallbladder,colorectal,lymphoid_neoplasm,prostate, thyroid,upper_gi,non_cancer,myeloid_neoplasm

SEQ ID NO: 472900 - DNA, 21 bp, Homo sapiens
  chr15:99506177-99506198
  hypo
  ovary vs. bladder_and_urothelial,head_and_neck,sarcoma, cervical,lung,melanoma,breast,renal,anorectal, pancreas_gallbladder,colorectal,lymphoid_neoplasm,prostate, thyroid,upper_gi,non_cancer,myeloid_neoplasm
atgtcccacgtgtgtgtgtcc

SEQ ID NO: 472901 - DNA, 148 bp, Homo sapiens; identical to SEQ ID NO: 342314
  chr15:101464778-101464926
  hypo
  ovary vs. breast,prostate,upper_gi,thyroid,renal, colorectal,melanoma,lung,pancreas_gallbladder, bladder_and_urothelial,cervical

SEQ ID NO: 472902 - DNA, 152 bp, Homo sapiens; identical to SEQ ID NO: 355314
  chr15:102043329-102043481
  hypo
  ovary vs. liver_bileduct,melanoma,uterine,colorectal, lymphoid_neoplasm,prostate,thyroid,renal,non_cancer, bladder_and_urothelial,pancreas_gallbladder,cervical,upper_gi, breast

SEQ ID NO: 472903 - DNA, 9 bp, Homo sapiens
  chr16:323599-323608
  hypo
  ovary vs. melanoma,myeloid_neoplasm
agcccctcc

SEQ ID NO: 472904 - DNA, 101 bp, Homo sapiens; identical to SEQ ID NO: 454819
  chr16:410895-410996
  hypo
  ovary vs. renal,thyroid,non_cancer,prostate, lymphoid_neoplasm,sarcoma,myeloid_neoplasm,breast,melanoma

SEQ ID NO: 472905 - DNA, 111 bp, Homo sapiens; identical to SEQ ID NO: 346109
  chr16:411606-411717
  hypo
  ovary vs. renal,thyroid,non_cancer,prostate, lymphoid_neoplasm,sarcoma,myeloid_neoplasm,breast,melanoma

SEQ ID NO: 472906 - DNA, 72 bp, Homo sapiens; identical to SEQ ID NO: 342335
  chr16:440413-440485
  hypo
  ovary vs. pancreas_gallbladder,colorectal,sarcoma,renal, bladder_and_urothelial,breast,upper_gi,lymphoid_neoplasm,lung, myeloid_neoplasm,prostate,non_cancer,thyroid,cervical, liver_bileduct,multiple_myeloma

SEQ ID NO: 472907 - DNA, 151 bp, Homo sapiens; identical to SEQ ID NO: 454821
  chr16:611800-611951
  hypo
  ovary vs. myeloid_neoplasm,thyroid,non_cancer, lymphoid_neoplasm,prostate,renal

SEQ ID NO: 472908 - DNA, 83 bp, Homo sapiens; identical to SEQ ID NO: 355329
  chr16:612320-612403
  hypo
  ovary vs. myeloid_neoplasm,thyroid,non_cancer, lymphoid_neoplasm,prostate,renal

SEQ ID NO: 472909 - DNA, 341 bp, Homo sapiens; identical to SEQ ID NO: 355339
  chr16:810054-810395
  hypo
  ovary vs. melanoma,uterine,lymphoid_neoplasm,renal, non_cancer,prostate

SEQ ID NO: 472910 - DNA, 127 bp, Homo sapiens; identical to SEQ ID NO: 456526
  chr16:845724-845851
  hypo
  ovary vs. thyroid

SEQ ID NO: 472911 - DNA, 50 bp, Homo sapiens; identical to SEQ ID NO: 366730
  chr16:1019685-1019735
  hypo
  ovary vs. uterine,pancreas_gallbladder, bladder_and_urothelial

SEQ ID NO: 472912 - DNA, 226 bp, Homo sapiens; identical to SEQ ID NO: 366732
  chr16:1036850-1037076
  hypo
  ovary vs. sarcoma,renal,cervical

SEQ ID NO: 472913 - DNA, 82 bp, Homo sapiens; identical to SEQ ID NO: 461555
  chr16:1154990-1155072
  hypo
  ovary vs. anorectal,thyroid,non_cancer,prostate

SEQ ID NO: 472914 - DNA, 132 bp, Homo sapiens
  chr16:1248221-1248353
  hypo
  ovary vs. myeloid_neoplasm,lymphoid_neoplasm
cgagcccgagatgccacgtggtcagacctgccgcagccagttccctgcctcggccagtcccctgcctccactcctgcccctccacaccccagccctccaaaagcagcagacctgctgccctgggatggttgg

SEQ ID NO: 472915 - DNA, 88 bp, Homo sapiens; identical to SEQ ID NO: 355347
  chr16:1248922-1249010
  hypo
  ovary vs. myeloid_neoplasm,lymphoid_neoplasm

SEQ ID NO: 472916 - DNA, 62 bp, Homo sapiens
  chr16:1271094-1271156
  hypo
  ovary vs. non_cancer,thyroid,prostate
cgtcgtgagcagaaaggcccggggaggatgacggcccaggccctggttctctgcccagcgaa

SEQ ID NO: 472917 - DNA, 53 bp, Homo sapiens; identical to SEQ ID NO: 342385
  chr16:1472227-1472280
  hypo
  ovary vs. sarcoma,lymphoid_neoplasm,multiple_myeloma

SEQ ID NO: 472918 - DNA, 195 bp, Homo sapiens; identical to SEQ ID NO: 456532
  chr16:1730112-1730307
  hypo
  ovary vs. melanoma,multiple_myeloma,sarcoma,colorectal, lymphoid_neoplasm,non_cancer,cervical

SEQ ID NO: 472919 - DNA, 105 bp, Homo sapiens; identical to SEQ ID NO: 346116
  chr16:1730761-1730866
  hypo
  ovary vs. melanoma,multiple_myeloma,sarcoma,colorectal, lymphoid_neoplasm,non_cancer,cervical

SEQ ID NO: 472920 - DNA, 346 bp, Homo sapiens; identical to SEQ ID NO: 355362
  chr16:1812272-1812618
  hypo
  ovary vs. upper_gi,bladder_and_urothelial, pancreas_gallbladder,lung,breast,liver_bileduct,melanoma

SEQ ID NO: 472921 - DNA, 53 bp, Homo sapiens; identical to SEQ ID NO: 366764
  chr16:1812929-1812982
  hypo
  ovary vs. liver_bileduct,uterine

SEQ ID NO: 472922 - DNA, 1 bp, Homo sapiens
  chr16:2029207-2029208
  hypo
  ovary vs. multiple_myeloma,lymphoid_neoplasm
c

SEQ ID NO: 472923 - DNA, 68 bp, Homo sapiens; identical to SEQ ID NO: 465182
  chr16:2106533-2106601
  hypo
  ovary vs. upper_gi,colorectal,head_and_neck,cervical, breast,melanoma,anorectal,pancreas_gallbladder,renal,prostate, bladder_and_urothelial,sarcoma,non_cancer,lymphoid_neoplasm, liver_bileduct,myeloid_neoplasm,lung

SEQ ID NO: 472924 - DNA, 63 bp, Homo sapiens; identical to SEQ ID NO: 465183
  chr16:2106641-2106704
  hypo
  ovary vs. upper_gi,colorectal,head_and_neck,cervical, breast,melanoma,anorectal,pancreas_gallbladder,renal,prostate, bladder_and_urothelial,sarcoma,non_cancer,lymphoid_neoplasm, liver_bileduct,myeloid_neoplasm,lung

SEQ ID NO: 472925 - DNA, 23 bp, Homo sapiens
  chr16:2106732-2106755
  hypo
  ovary vs. upper_gi,colorectal,head_and_neck,cervical, breast,melanoma,anorectal,pancreas_gallbladder,renal,prostate, bladder_and_urothelial,sarcoma,non_cancer,lymphoid_neoplasm, liver_bileduct,myeloid_neoplasm,lung
ccatcaacgtcaaggagctctgc

SEQ ID NO: 472926 - DNA, 28 bp, Homo sapiens
  chr16:2106988-2107016
  hypo
  ovary vs. head_and_neck,upper_gi,melanoma, pancreas_gallbladder,colorectal,bladder_and_urothelial,renal, anorectal,multiple_myeloma,cervical,breast,myeloid_neoplasm, lymphoid_neoplasm,prostate,sarcoma,liver_bileduct,non_cancer,
  CONT. FROM ABOVE: lung,thyroid
cgagctggccggaccttgggtggctata

SEQ ID NO: 472927 - DNA, 426 bp, Homo sapiens; identical to SEQ ID NO: 346122
  chr16:2107057-2107483
  hypo
  ovary vs. head_and_neck,upper_gi,melanoma, pancreas_gallbladder,colorectal,bladder_and_urothelial,renal, anorectal,multiple_myeloma,cervical,breast,myeloid_neoplasm, lymphoid_neoplasm,prostate,sarcoma,liver_bileduct,non_cancer,
  CONT. FROM ABOVE: lung,thyroid

SEQ ID NO: 472928 - DNA, 440 bp, Homo sapiens; identical to SEQ ID NO: 342413
  chr16:2108531-2108971
  hypo
  ovary vs. upper_gi,colorectal,anorectal,head_and_neck, melanoma,cervical,liver_bileduct,pancreas_gallbladder,lung, bladder_and_urothelial,breast,multiple_myeloma,sarcoma

SEQ ID NO: 472929 - DNA, 229 bp, Homo sapiens
  chr16:2131440-2131669
  hypo
  ovary vs. uterine,breast,lymphoid_neoplasm,renal, bladder_and_urothelial,colorectal,melanoma,pancreas_gallbladder
cgtcagagcagcgctggctccgacatcgtggtcctgaggattgtgggagggagcatgagggcaaaaccagggcccaggccaggaggcccctggggggccagagatgggtaaggggaggtactggcctcaggccaaaggtgctgccgcctccgcagggaacaccagctggctgatgagcctggagaacccgctcagccctttctcctcggacatcaacaacatgcccctg

SEQ ID NO: 472930 - DNA, 169 bp, Homo sapiens
  chr16:2146195-2146364
  hypo
  ovary vs. sarcoma,melanoma,prostate,colorectal, pancreas_gallbladder,myeloid_neoplasm,multiple_myeloma, non_cancer
cgtagttacccaaacccagacaccgcagcccctgtgcatgcaggccctgtggtgtggcctgtggctccggggcaccgcacctgcactgcatgccactgcactgaatcctgcaggcagctgcagtgcaacggcagggccgtgtggacctcagcacacctgagcataggag

SEQ ID NO: 472931 - DNA, 73 bp, Homo sapiens; identical to SEQ ID NO: 454826
  chr16:2278311-2278384
  hypo
  ovary vs. sarcoma,renal,uterine,myeloid_neoplasm, lymphoid_neoplasm

SEQ ID NO: 472932 - DNA, 198 bp, Homo sapiens; identical to SEQ ID NO: 342426
  chr16:2477175-2477373
  hypo
  ovary vs. cervical,sarcoma

SEQ ID NO: 472933 - DNA, 395 bp, Homo sapiens; identical to SEQ ID NO: 465193
  chr16:2540434-2540829
  hypo
  ovary vs. head_and_neck,cervical,anorectal,melanoma, sarcoma

SEQ ID NO: 472934 - DNA, 60 bp, Homo sapiens; identical to SEQ ID NO: 346131
  chr16:2540933-2540993
  hypo
  ovary vs. head_and_neck,cervical,anorectal,melanoma, sarcoma

SEQ ID NO: 472935 - DNA, 383 bp, Homo sapiens; identical to SEQ ID NO: 355392
  chr16:2642765-2643148
  hypo
  ovary vs. lung,upper_gi,uterine,colorectal, pancreas_gallbladder,head_and_neck,liver_bileduct,melanoma, renal,breast,bladder_and_urothelial

SEQ ID NO: 472936 - DNA, 3 bp, Homo sapiens
  chr16:4203909-4203912
  hypo
  ovary vs. anorectal,cervical,sarcoma,renal,lung
cga

SEQ ID NO: 472937 - DNA, 193 bp, Homo sapiens; identical to SEQ ID NO: 348725
  chr16:4203995-4204188
  hypo
  ovary vs. anorectal,cervical,sarcoma,renal,lung

SEQ ID NO: 472938 - DNA, 69 bp, Homo sapiens
  chr16:4430998-4431067
  hypo
  ovary vs. head_and_neck,pancreas_gallbladder, bladder_and_urothelial,anorectal,upper_gi,liver_bileduct,lung, colorectal,melanoma,prostate,cervical,lymphoid_neoplasm,breast, non_cancer,uterine,multiple_myeloma
cgccaggggaccacggtgccccgagacgtgccacccgacacggtggggctgtacgtctttgagaacggc

SEQ ID NO: 472939 - DNA, 8 bp, Homo sapiens
  chr16:4431119-4431127
  hypo
  ovary vs. head_and_neck,pancreas_gallbladder, bladder_and_urothelial,anorectal,upper_gi,liver_bileduct,lung, colorectal,melanoma,prostate,cervical,lymphoid_neoplasm,breast, non_cancer,uterine,multiple_myeloma
tggacctg

SEQ ID NO: 472940 - DNA, 299 bp, Homo sapiens
  chr16:4431189-4431488
  hypo
  ovary vs. head_and_neck,pancreas_gallbladder, bladder_and_urothelial,anorectal,upper_gi,liver_bileduct,lung, colorectal,melanoma,prostate,cervical,lymphoid_neoplasm,breast, non_cancer,uterine,multiple_myeloma
cctggacctgacagccaacaggctgcatgaaatcaccaatgagaccttccgtggcctgcggcgcctcgagcgcctctacctgggcaagaaccgcatccgccacatccagcctggtgccttcgacacgctcgaccgcctcctggagctcaagctgcaggacaacgagctgcgggcactgcccccgctgcgcctgccccgcctgctgctgctggacctcagccacaacagcctcctggccctggagcccggcatcctggacactgccaacgtggaggcgctgcggctggctggtctggggc

SEQ ID NO: 472941 - DNA, 313 bp, Homo sapiens; identical to SEQ ID NO: 355412
  chr16:4431516-4431829
  hypo
  ovary vs. head_and_neck,pancreas_gallbladder, bladder_and_urothelial,anorectal,upper_gi,liver_bileduct,lung, colorectal,melanoma,prostate,cervical,lymphoid_neoplasm,breast, non_cancer,uterine,multiple_myeloma

SEQ ID NO: 472942 - DNA, 847 bp, Homo sapiens; identical to SEQ ID NO: 342461
  chr16:4431854-4432701
  hypo
  ovary vs. head_and_neck,lung,bladder_and_urothelial, uterine,breast,lymphoid_neoplasm,multiple_myeloma,anorectal, upper_gi,melanoma

SEQ ID NO: 472943 - DNA, 161 bp, Homo sapiens; identical to SEQ ID NO: 456550
  chr16:4845976-4846137
  hypo
  ovary vs. sarcoma,renal,melanoma

SEQ ID NO: 472944 - DNA, 42 bp, Homo sapiens; identical to SEQ ID NO: 342484
  chr16:11037121-11037163
  hypo
  ovary vs. multiple_myeloma,lymphoid_neoplasm,renal, colorectal

SEQ ID NO: 472945 - DNA, 41 bp, Homo sapiens; identical to SEQ ID NO: 342516
  chr16:21515452-21515493
  hypo
  ovary vs. lung

SEQ ID NO: 472946 - DNA, 19 bp, Homo sapiens
  chr16:30124861-30124880
  hypo
  ovary vs. melanoma
tgcctagccagtgtgggcc

SEQ ID NO: 472947 - DNA, 34 bp, Homo sapiens
  chr16:30833291-30833325
  hypo
  ovary vs. lung
cgtggcctgccgcaaagcagatactcctccggac

SEQ ID NO: 472948 - DNA, 41 bp, Homo sapiens; identical to SEQ ID NO: 381196
  chr16:30833354-30833395
  hypo
  ovary vs. lung

SEQ ID NO: 472949 - DNA, 201 bp, Homo sapiens; identical to SEQ ID NO: 342566
  chr16:31487152-31487353
  hypo
  ovary vs. bladder_and_urothelial

SEQ ID NO: 472950 - DNA, 507 bp, Homo sapiens; identical to SEQ ID NO: 342569
  chr16:46683305-46683812
  hypo
  ovary vs. anorectal,colorectal,myeloid_neoplasm, lymphoid_neoplasm

SEQ ID NO: 472951 - DNA, 121 bp, Homo sapiens; identical to SEQ ID NO: 342574
  chr16:48663537-48663658
  hypo
  ovary vs. lung,sarcoma,liver_bileduct,breast

SEQ ID NO: 472952 - DNA, 246 bp, Homo sapiens; identical to SEQ ID NO: 342593
  chr16:57559728-57559974
  hypo
  ovary vs. upper_gi,pancreas_gallbladder, bladder_and_urothelial

SEQ ID NO: 472953 - DNA, 113 bp, Homo sapiens
  chr16:58192178-58192291
  hypo
  ovary vs. lung
cgtgatctctctatacgcgttaagacgtttgatttggttcttgttctgcttatggaaaagtgggagaaccgcaacagacctggggaaagagacgggaggagggaaagacgtca

SEQ ID NO: 472954 - DNA, 574 bp, Homo sapiens; identical to SEQ ID NO: 366958
  chr16:69354730-69355304
  hypo
  ovary vs. lung

SEQ ID NO: 472955 - DNA, 86 bp, Homo sapiens; identical to SEQ ID NO: 342644
  chr16:74984568-74984654
  hypo
  ovary vs. colorectal,liver_bileduct,lung,sarcoma, lymphoid_neoplasm,pancreas_gallbladder,upper_gi, multiple_myeloma,prostate,cervical,bladder_and_urothelial

SEQ ID NO: 472956 - DNA, 61 bp, Homo sapiens; identical to SEQ ID NO: 453709
  chr16:75148493-75148554
  hypo
  ovary vs. liver_bileduct,renal

SEQ ID NO: 472957 - DNA, 136 bp, Homo sapiens; identical to SEQ ID NO: 348759
  chr16:75149151-75149287
  hypo
  ovary vs. liver_bileduct,renal

SEQ ID NO: 472958 - DNA, 109 bp, Homo sapiens; identical to SEQ ID NO: 342679
  chr16:84170884-84170993
  hypo
  ovary vs. lung,upper_gi,breast

SEQ ID NO: 472959 - DNA, 175 bp, Homo sapiens; identical to SEQ ID NO: 342697
  chr16:85465108-85465283
  hypo
  ovary vs. uterine,colorectal,anorectal

SEQ ID NO: 472960 - DNA, 50 bp, Homo sapiens; identical to SEQ ID NO: 465237
  chr16:85517169-85517219
  hypo
  ovary vs. renal,sarcoma,non_cancer

SEQ ID NO: 472961 - DNA, 137 bp, Homo sapiens; identical to SEQ ID NO: 355510
  chr16:85517620-85517757
  hypo
  ovary vs. renal,sarcoma,non_cancer

SEQ ID NO: 472962 - DNA, 105 bp, Homo sapiens; identical to SEQ ID NO: 342722
  chr16:87471750-87471855
  hypo
  ovary vs. liver_bileduct

SEQ ID NO: 472963 - DNA, 88 bp, Homo sapiens; identical to SEQ ID NO: 342742
  chr16:88458615-88458703
  hypo
  ovary vs. anorectal

SEQ ID NO: 472964 - DNA, 34 bp, Homo sapiens; identical to SEQ ID NO: 463423
  chr16:89109415-89109449
  hypo
  ovary vs. anorectal

SEQ ID NO: 472965 - DNA, 121 bp, Homo sapiens; identical to SEQ ID NO: 367077
  chr16:89109659-89109780
  hypo
  ovary vs. anorectal

SEQ ID NO: 472966 - DNA, 1 bp, Homo sapiens
  chr16:89119921-89119922
  hypo
  ovary vs. myeloid_neoplasm
c

SEQ ID NO: 472967 - DNA, 214 bp, Homo sapiens
  chr16:89141710-89141924
  hypo
  ovary vs. head_and_neck
cgggtacctgccgtagctatgtccagcccaggtcactgagtgtgtaaacacacctcacgtccgcgtcgagaaggcgtcaccagtgcctgctgaacaaagaaggtctggcccagtgtggctgcagccaggaggccaaggagaccagtgagagcaccgccctcgccactgacgctcttgctgggctcattgttgtgctgggcccagtggagcaaaa

SEQ ID NO: 472968 - DNA, 148 bp, Homo sapiens; identical to SEQ ID NO: 367079
  chr16:89141953-89142101
  hypo
  ovary vs. head_and_neck

SEQ ID NO: 472969 - DNA, 6 bp, Homo sapiens
  chr16:89219313-89219319
  hypo
  ovary vs. renal,cervical,lung,pancreas_gallbladder, prostate,thyroid,breast,uterine,colorectal,upper_gi,non_cancer, liver_bileduct,multiple_myeloma,bladder_and_urothelial
cgattt

SEQ ID NO: 472970 - DNA, 226 bp, Homo sapiens
  chr16:89219372-89219598
  hypo
  ovary vs. renal,cervical,lung,pancreas_gallbladder, prostate,thyroid,breast,uterine,colorectal,upper_gi,non_cancer, liver_bileduct,multiple_myeloma,bladder_and_urothelial
ctggagagcgagagactgggctgggccgactcccacctctgtcgcgagaggcctacgggcaggggcaggtgggcagggggactgtgctgggtctctggccgcgtctggacggcaggcgacactttctccacaaaaagcgtcaagaaaccacgacacttggtttctggacttttccgcggaacagtaaccagaacaatcgccatgaaggttcgtttctgtcatggct

SEQ ID NO: 472971 - DNA, 310 bp, Homo sapiens; identical to SEQ ID NO: 342818
  chr17:1028640-1028950
  hypo
  ovary vs. upper_gi

SEQ ID NO: 472972 - DNA, 194 bp, Homo sapiens; identical to SEQ ID NO: 342825
  chr17:1462644-1462838
  hypo
  ovary vs. liver_bileduct,pancreas_gallbladder, bladder_and_urothelial,lung,upper_gi,colorectal,cervical, sarcoma,thyroid,renal

SEQ ID NO: 472973 - DNA, 593 bp, Homo sapiens; identical to SEQ ID NO: 342841
  chr17:3716199-3716792
  hypo
  ovary vs. lung,uterine,colorectal,liver_bileduct,renal, prostate

SEQ ID NO: 472974 - DNA, 336 bp, Homo sapiens; identical to SEQ ID NO: 342850
  chr17:4392128-4392464
  hypo
  ovary vs. upper_gi

SEQ ID NO: 472975 - DNA, 37 bp, Homo sapiens; identical to SEQ ID NO: 456607
  chr17:4446272-4446309
  hypo
  ovary vs. uterine,bladder_and_urothelial,cervical, colorectal,lung,liver_bileduct,upper_gi,melanoma,renal, lymphoid_neoplasm,head_and_neck

SEQ ID NO: 472976 - DNA, 138 bp, Homo sapiens; identical to SEQ ID NO: 355578
  chr17:4446376-4446514
  hypo
  ovary vs. uterine,bladder_and_urothelial,cervical, colorectal,lung,liver_bileduct,upper_gi,melanoma,renal, lymphoid_neoplasm,head_and_neck

SEQ ID NO: 472977 - DNA, 507 bp, Homo sapiens; identical to SEQ ID NO: 342855
  chr17:4795549-4796056
  hypo
  ovary vs. lung,upper_gi,cervical,bladder_and_urothelial, uterine,liver_bileduct,breast,multiple_myeloma, pancreas_gallbladder,anorectal,melanoma,head_and_neck, colorectal,myeloid_neoplasm

SEQ ID NO: 472978 - DNA, 707 bp, Homo sapiens; identical to SEQ ID NO: 381510
  chr17:6474321-6475028
  hypo
  ovary vs. cervical,head_and_neck

SEQ ID NO: 472979 - DNA, 156 bp, Homo sapiens; identical to SEQ ID NO: 346157
  chr17:7369222-7369378
  hypo
  ovary vs. uterine,cervical,liver_bileduct,head_and_neck, pancreas_gallbladder,breast,anorectal,lymphoid_neoplasm, non_cancer,prostate,melanoma,multiple_myeloma,colorectal, upper_gi,renal,bladder_and_urothelial,myeloid_neoplasm,sarcoma,
  CONT. FROM ABOVE: lung,thyroid

SEQ ID NO: 472980 - DNA, 675 bp, Homo sapiens; identical to SEQ ID NO: 472536
  chr17:16283956-16284631
  hypo
  ovary vs. lymphoid_neoplasm,liver_bileduct,lung,upper_gi, renal,pancreas_gallbladder,breast,prostate,colorectal, myeloid_neoplasm,multiple_myeloma,non_cancer, bladder_and_urothelial,head_and_neck

SEQ ID NO: 472981 - DNA, 389 bp, Homo sapiens; identical to SEQ ID NO: 472537
  chr17:16284242-16284631
  hypo
  ovary vs. liver_bileduct,lung,lymphoid_neoplasm,renal, breast,prostate,upper_gi,colorectal,myeloid_neoplasm, pancreas_gallbladder,multiple_myeloma,non_cancer, bladder_and_urothelial,thyroid

SEQ ID NO: 472982 - DNA, 39 bp, Homo sapiens; identical to SEQ ID NO: 347411
  chr17:16285065-16285104
  hypo
  ovary vs. liver_bileduct,lung,lymphoid_neoplasm,renal, breast,prostate,upper_gi,colorectal,myeloid_neoplasm, pancreas_gallbladder,multiple_myeloma,non_cancer, bladder_and_urothelial,thyroid

SEQ ID NO: 472983 - DNA, 208 bp, Homo sapiens; identical to SEQ ID NO: 342905
  chr17:17224346-17224554
  hypo
  ovary vs. uterine,prostate,breast,sarcoma,renal,lung, myeloid_neoplasm

SEQ ID NO: 472984 - DNA, 77 bp, Homo sapiens
  chr17:17717893-17717970
  hypo
  ovary vs. bladder_and_urothelial,pancreas_gallbladder
cgggaccaggcaggaggaacctgccgtgcactcactcagactcctgcagcacccggggcaggtgctccaccagcggg

SEQ ID NO: 472985 - DNA, 142 bp, Homo sapiens; identical to SEQ ID NO: 342912
  chr17:18083378-18083520
  hypo
  ovary vs. pancreas_gallbladder,lung, bladder_and_urothelial,breast,cervical,uterine,head_and_neck

SEQ ID NO: 472986 - DNA, 121 bp, Homo sapiens; identical to SEQ ID NO: 342948
  chr17:29773391-29773512
  hypo
  ovary vs. upper_gi,bladder_and_urothelial,colorectal, lung,melanoma

SEQ ID NO: 472987 - DNA, 93 bp, Homo sapiens; identical to SEQ ID NO: 342962
  chr17:36864049-36864142
  hypo
  ovary vs. sarcoma

SEQ ID NO: 472988 - DNA, 179 bp, Homo sapiens; identical to SEQ ID NO: 342970
  chr17:37819059-37819238
  hypo
  ovary vs. lung,head_and_neck,multiple_myeloma

SEQ ID NO: 472989 - DNA, 230 bp, Homo sapiens; identical to SEQ ID NO: 343001
  chr17:43180339-43180569
  hypo
  ovary vs. anorectal,uterine,liver_bileduct,lung,prostate

SEQ ID NO: 472990 - DNA, 25 bp, Homo sapiens
  chr17:49229457-49229482
  hypo
  ovary vs. multiple_myeloma,renal,lymphoid_neoplasm
cgcgggaagctgagtcacgagaatc

SEQ ID NO: 472991 - DNA, 48 bp, Homo sapiens; identical to SEQ ID NO: 348820
  chr17:57297129-57297177
  hypo
  ovary vs. lymphoid_neoplasm

SEQ ID NO: 472992 - DNA, 235 bp, Homo sapiens; identical to SEQ ID NO: 343046
  chr17:59239030-59239265
  hypo
  ovary vs. head_and_neck,lung,cervical

SEQ ID NO: 472993 - DNA, 112 bp, Homo sapiens; identical to SEQ ID NO: 454237
  chr17:61777761-61777873
  hypo
  ovary vs. anorectal,cervical,multiple_myeloma,sarcoma

SEQ ID NO: 472994 - DNA, 76 bp, Homo sapiens; identical to SEQ ID NO: 345537
  chr17:61778423-61778499
  hypo
  ovary vs. anorectal,cervical,multiple_myeloma,sarcoma

SEQ ID NO: 472995 - DNA, 206 bp, Homo sapiens; identical to SEQ ID NO: 381714
  chr17:66416586-66416792
  hypo
  ovary vs. liver_bileduct

SEQ ID NO: 472996 - DNA, 29 bp, Homo sapiens
  chr17:66434420-66434449
  hypo
  ovary vs. myeloid_neoplasm,colorectal,multiple_myeloma
cctggccccagccttagaagaggccactc

SEQ ID NO: 472997 - DNA, 85 bp, Homo sapiens
  chr17:73090991-73091076
  hypo
  ovary vs. uterine,head_and_neck,renal,prostate,cervical
cgttgggagcagggcagagggagggttctctgcagtcgccgtggacacagggacctgccctcagctcctgggagctctccaggga

SEQ ID NO: 472998 - DNA, 258 bp, Homo sapiens
  chr17:73091180-73091438
  hypo
  ovary vs. uterine,head_and_neck,renal,prostate,cervical
ccccggctacctcctggctactccctccacttgccaccagcagcctgcctattattccaggtcctgccctcaaactgggagggaggtgaggctcggagaaagcgccaccctcctgggtgagctctgaatctgccacatggcctctggcctgcagggttggggcagggagtgggaatcccagagggctgcttctcacacaggcagagcagggttcctgggccaggggctaggaaccgggcacccggcggggaacctact

SEQ ID NO: 472999 - DNA, 48 bp, Homo sapiens; identical to SEQ ID NO: 346169
  chr17:73215386-73215434
  hypo
  ovary vs. lung,uterine,upper_gi,head_and_neck, pancreas_gallbladder,colorectal,breast,bladder_and_urothelial, cervical,lymphoid_neoplasm,multiple_myeloma,renal,sarcoma, prostate,anorectal,liver_bileduct,melanoma,myeloid_neoplasm,
  CONT. FROM ABOVE: thyroid,non_cancer

SEQ ID NO: 473000 - DNA, 26 bp, Homo sapiens
  chr17:73236176-73236202
  hypo
  ovary vs. renal,upper_gi,prostate,pancreas_gallbladder, bladder_and_urothelial,uterine,liver_bileduct,thyroid,cervical, sarcoma,lymphoid_neoplasm,colorectal,myeloid_neoplasm
cggactgttccctctatgaacaacag

SEQ ID NO: 473001 - DNA, 104 bp, Homo sapiens; identical to SEQ ID NO: 367344
  chr17:73236302-73236406
  hypo
  ovary vs. renal,upper_gi,prostate,pancreas_gallbladder, bladder_and_urothelial,uterine,liver_bileduct,thyroid,cervical, sarcoma,lymphoid_neoplasm,colorectal,myeloid_neoplasm

SEQ ID NO: 473002 - DNA, 119 bp, Homo sapiens; identical to SEQ ID NO: 465297
  chr17:74390245-74390364
  hypo
  ovary vs. sarcoma,multiple_myeloma

SEQ ID NO: 473003 - DNA, 182 bp, Homo sapiens; identical to SEQ ID NO: 348837
  chr17:74390459-74390641
  hypo
  ovary vs. sarcoma,multiple_myeloma

SEQ ID NO: 473004 - DNA, 176 bp, Homo sapiens; identical to SEQ ID NO: 381786
  chr17:74858667-74858843
  hypo
  ovary vs. upper_gi

SEQ ID NO: 473005 - DNA, 689 bp, Homo sapiens; identical to SEQ ID NO: 343143
  chr17:75213347-75214036
  hypo
  ovary vs. bladder_and_urothelial,liver_bileduct, head_and_neck,sarcoma,breast,renal,lymphoid_neoplasm,melanoma, upper_gi,uterine,lung,pancreas_gallbladder,multiple_myeloma

SEQ ID NO: 473006 - DNA, 281 bp, Homo sapiens; identical to SEQ ID NO: 343147
  chr17:75848787-75849068
  hypo
  ovary vs. pancreas_gallbladder

SEQ ID NO: 473007 - DNA, 331 bp, Homo sapiens
  chr17:76187077-76187408
  hypo
  ovary vs. lung,head_and_neck,upper_gi,colorectal, cervical,pancreas_gallbladder,liver_bileduct,melanoma,breast, bladder_and_urothelial,uterine,prostate,sarcoma,non_cancer, myeloid_neoplasm
cgatgggttgtccgactgggagcagaggaagccttgaggacctactcacagataggaattgaaggtactagtgtgacctctccgtggccgcattgggtgtccttaagcatgtggcagtgattcagaatgctgggggttgggggggctgtgctgcaccacctgggcctcgaggggcatttcccaaacaccaggcactttataaacctccctgctcaggggcaggtgcccaggaccccttgctgcagggactactggaggcaggagaggtccgggggaggtccacggctcagtcgaccatgcctggcctttcttgctcagccatccataccca

SEQ ID NO: 473008 - DNA, 443 bp, Homo sapiens; identical to SEQ ID NO: 343159
  chr17:76818622-76819065
  hypo
  ovary vs. upper_gi

SEQ ID NO: 473009 - DNA, 1 bp, Homo sapiens
  chr17:77084727-77084728
  hypo
  ovary vs. upper_gi,head_and_neck,lung, pancreas_gallbladder,breast,cervical,colorectal,anorectal, melanoma,prostate,renal
c

SEQ ID NO: 473010 - DNA, 399 bp, Homo sapiens; identical to SEQ ID NO: 355747
  chr17:78163400-78163799
  hypo
  ovary vs. upper_gi,lung,bladder_and_urothelial,uterine, anorectal,breast,head_and_neck,cervical

SEQ ID NO: 473011 - DNA, 195 bp, Homo sapiens; identical to SEQ ID NO: 343212
  chr17:79045500-79045695
  hypo
  ovary vs. bladder_and_urothelial,head_and_neck,upper_gi, lung,colorectal

SEQ ID NO: 473012 - DNA, 415 bp, Homo sapiens; identical to SEQ ID NO: 343228
  chr17:79175952-79176367
  hypo
  ovary vs. upper_gi,uterine

SEQ ID NO: 473013 - DNA, 169 bp, Homo sapiens
  chr17:79887422-79887591
  hypo
  ovary vs. thyroid,myeloid_neoplasm,uterine,prostate, non_cancer,multiple_myeloma,bladder_and_urothelial,cervical, colorectal,melanoma,sarcoma,pancreas_gallbladder,lung
cggctcctggccagctccccacggagagcccaggacacttgtccctggacacagtggtgcagccatgcttgggccaaaccatgaggccaccagaaccgcgaaaggctactgtactgagagggatactgcgagagaggcccacaggtttccaagcatccctctcactccg

SEQ ID NO: 473014 - DNA, 56 bp, Homo sapiens; identical to SEQ ID NO: 348855
  chr17:79887849-79887905
  hypo
  ovary vs. thyroid,myeloid_neoplasm,uterine,prostate, non_cancer,multiple_myeloma,bladder_and_urothelial,cervical, colorectal,melanoma,sarcoma,pancreas_gallbladder,lung

SEQ ID NO: 473015 - DNA, 113 bp, Homo sapiens
  chr17:80654614-80654727
  hypo
  ovary vs. uterine,sarcoma,anorectal, bladder_and_urothelial,thyroid,cervical,head_and_neck, lymphoid_neoplasm,multiple_myeloma,myeloid_neoplasm,prostate, melanoma,renal,non_cancer,lung,colorectal
cgctcaatctccagccctgtcctccaggcgctcaatctccagccctgtcctccaggcgctcaatctccagggcagcgctggccctcggactttgccacagcgacatccgaact

SEQ ID NO: 473016 - DNA, 330 bp, Homo sapiens
  chr17:80712024-80712354
  hypo
  ovary vs. cervical,liver_bileduct,renal,anorectal, melanoma,thyroid,prostate,breast,multiple_myeloma,head_and_neck
cgcccggctggagttttattattactcagatcagtctccctgagaatttgagggccagggttttttagaggtaatctgggggaaagggtgggggtggctgattggttaggggtatacaatcataggggagtcggaaatgatcctccgtgatgtgctgaatcgcgtctgcgtggggccccaggagcagtgggcgggtccaggtggagctatcatgggtccgtggatcctagtgtaggtgtcagacatggaaacaatctgaaaagatatctttaaaggccagtctcaggttctgcaatagtgacatggtctgcaggagtaactggggaactc

SEQ ID NO: 473017 - DNA, 121 bp, Homo sapiens; identical to SEQ ID NO: 343271
  chr17:80749629-80749750
  hypo
  ovary vs. prostate,lymphoid_neoplasm,myeloid_neoplasm, multiple_myeloma,breast,non_cancer

SEQ ID NO: 473018 - DNA, 33 bp, Homo sapiens; identical to SEQ ID NO: 453753
  chr17:80797632-80797665
  hypo
  ovary vs. myeloid_neoplasm,lymphoid_neoplasm

SEQ ID NO: 473019 - DNA, 69 bp, Homo sapiens; identical to SEQ ID NO: 343305
  chr18:3580264-3580333
  hypo
  ovary vs. head_and_neck,colorectal

SEQ ID NO: 473020 - DNA, 185 bp, Homo sapiens; identical to SEQ ID NO: 343306
  chr18:3580794-3580979
  hypo
  ovary vs. head_and_neck,sarcoma,pancreas_gallbladder, cervical,lung,melanoma,breast,colorectal

SEQ ID NO: 473021 - DNA, 241 bp, Homo sapiens; identical to SEQ ID NO: 343307
  chr18:3581880-3582121
  hypo
  ovary vs. pancreas_gallbladder

SEQ ID NO: 473022 - DNA, 3 bp, Homo sapiens
  chr18:9913003-9913006
  hypo
  ovary vs. renal
atc

SEQ ID NO: 473023 - DNA, 141 bp, Homo sapiens; identical to SEQ ID NO: 469687
  chr18:12375127-12375268
  hypo
  ovary vs. multiple_myeloma,anorectal,uterine, myeloid_neoplasm,thyroid,cervical,lung,pancreas_gallbladder, prostate,non_cancer,bladder_and_urothelial,head_and_neck

SEQ ID NO: 473024 - DNA, 61 bp, Homo sapiens; identical to SEQ ID NO: 469688
  chr18:12375294-12375355
  hypo
  ovary vs. multiple_myeloma,anorectal,uterine, myeloid_neoplasm,thyroid,cervical,lung,pancreas_gallbladder, prostate,non_cancer,bladder_and_urothelial,head_and_neck

SEQ ID NO: 473025 - DNA, 115 bp, Homo sapiens; identical to SEQ ID NO: 343343
  chr18:12375778-12375893
  hypo
  ovary vs. multiple_myeloma

SEQ ID NO: 473026 - DNA, 5 bp, Homo sapiens
  chr18:12375948-12375953
  hypo
cggcc

SEQ ID NO: 473027 - DNA, 1 bp, Homo sapiens
  chr18:12376072-12376073
  hypo
c

SEQ ID NO: 473028 - DNA, 334 bp, Homo sapiens
  chr18:13131747-13132081
  hypo
  ovary vs. lung,pancreas_gallbladder
cgacggtgcctaattgatacatacaaatcaatagtcttcctatacataaggaaataatgaacgaccagaaaacagcggaagacaaaacagcagaaataagtttagaaatgtgtgaagtgtatacaaaggaaactgtcaggttcctctggagcacatcggagacttgagtaggagtaacttaccggactgcactgggggccttcttccgtagcatgaacagcacccatgagtggggatggggctggggccgcaccagtccaggcagcatttcccccagtggagggggagctctgcaggtgcccagcctcccacgctgtttcagtagcttgttagg

SEQ ID NO: 473029 - DNA, 340 bp, Homo sapiens; identical to SEQ ID NO: 343354
  chr18:13442504-13442844
  hypo
  ovary vs. breast,thyroid,colorectal,non_cancer, pancreas_gallbladder,prostate,renal,anorectal,head_and_neck, melanoma

SEQ ID NO: 473030 - DNA, 141 bp, Homo sapiens; identical to SEQ ID NO: 465321
  chr18:47285293-47285434
  hypo
  ovary vs. liver_bileduct

SEQ ID NO: 473031 - DNA, 128 bp, Homo sapiens; identical to SEQ ID NO: 465323
  chr18:72347372-72347500
  hypo
  ovary vs. head_and_neck,cervical,melanoma,prostate, anorectal,renal,pancreas_gallbladder,breast,colorectal,upper_gi, lymphoid_neoplasm,bladder_and_urothelial,liver_bileduct, non_cancer,uterine,thyroid,sarcoma,multiple_myeloma

SEQ ID NO: 473032 - DNA, 74 bp, Homo sapiens; identical to SEQ ID NO: 355856
  chr18:72347576-72347650
  hypo
  ovary vs. head_and_neck,cervical,melanoma,prostate, anorectal,renal,pancreas_gallbladder,breast,colorectal,upper_gi, lymphoid_neoplasm,bladder_and_urothelial,liver_bileduct, non_cancer,uterine,thyroid,sarcoma,multiple_myeloma

SEQ ID NO: 473033 - DNA, 161 bp, Homo sapiens; identical to SEQ ID NO: 465328
  chr18:77508739-77508900
  hypo
  ovary vs. liver_bileduct,renal,cervical,breast,melanoma, bladder_and_urothelial,upper_gi,non_cancer,pancreas_gallbladder, prostate,lymphoid_neoplasm,colorectal,multiple_myeloma, anorectal,myeloid_neoplasm,thyroid,head_and_neck,lung,sarcoma,
  CONT. FROM ABOVE: uterine

SEQ ID NO: 473034 - DNA, 399 bp, Homo sapiens; identical to SEQ ID NO: 465329
  chr18:77508946-77509345
  hypo
  ovary vs. liver_bileduct,renal,cervical,breast,melanoma, bladder_and_urothelial,upper_gi,non_cancer,pancreas_gallbladder, prostate,lymphoid_neoplasm,colorectal,multiple_myeloma, anorectal,myeloid_neoplasm,thyroid,head_and_neck,lung,sarcoma,
  CONT. FROM ABOVE: uterine

SEQ ID NO: 473035 - DNA, 315 bp, Homo sapiens; identical to SEQ ID NO: 465330
  chr18:77509030-77509345
  hypo
  ovary vs. upper_gi,melanoma,liver_bileduct,renal, colorectal,breast,cervical,non_cancer,pancreas_gallbladder, prostate,multiple_myeloma,lymphoid_neoplasm, bladder_and_urothelial,myeloid_neoplasm,anorectal,head_and_neck,
  CONT. FROM ABOVE: thyroid,lung,uterine,sarcoma

SEQ ID NO: 473036 - DNA, 116 bp, Homo sapiens; identical to SEQ ID NO: 346189
  chr18:77509679-77509795
  hypo
  ovary vs. upper_gi,melanoma,liver_bileduct,renal, colorectal,breast,cervical,non_cancer,pancreas_gallbladder, prostate,multiple_myeloma,lymphoid_neoplasm, bladder_and_urothelial,myeloid_neoplasm,anorectal,head_and_neck,
  CONT. FROM ABOVE: thyroid,lung,uterine,sarcoma

SEQ ID NO: 473037 - DNA, 42 bp, Homo sapiens; identical to SEQ ID NO: 343495
  chr18:77510442-77510484
  hypo
  ovary vs. liver_bileduct

SEQ ID NO: 473038 - DNA, 268 bp, Homo sapiens; identical to SEQ ID NO: 343497
  chr18:77535504-77535772
  hypo
  ovary vs. lymphoid_neoplasm

SEQ ID NO: 473039 - DNA, 266 bp, Homo sapiens; identical to SEQ ID NO: 453773
  chr18:77542640-77542906
  hypo
  ovary vs. thyroid,melanoma,lymphoid_neoplasm,renal, non_cancer

SEQ ID NO: 473040 - DNA, 271 bp, Homo sapiens; identical to SEQ ID NO: 453774
  chr18:77542951-77543222
  hypo
  ovary vs. thyroid,melanoma,lymphoid_neoplasm,renal, non_cancer

SEQ ID NO: 473041 - DNA, 2 bp, Homo sapiens
  chr18:77543376-77543378
  hypo
  ovary vs. thyroid,melanoma,lymphoid_neoplasm,renal, non_cancer
ac

SEQ ID NO: 473042 - DNA, 363 bp, Homo sapiens
  chr18:77627972-77628335
  hypo
  ovary vs. head_and_neck
cggctgctgcctgcagtctgggtgtctggcggccaggctgccttcccccgtcgtccccatgaggtccaggtcctgatcgtgcttccaaaaggtgctggagtgtttggctgtcctcggtcgaatatccaggagggaaaattcatttgtgtcacgttagagaataggagaagtttgggctgccccagctacagaagtcaccccaggaacaccagccctaacccttactgtggaccccaaaaccccagatcctctcagggacaaccctgggctccgtggcacccagcccttcacactcctggcacgcacccctaaattgcttgtccagttaagaagcagtcgccctccgcgtggggcctggtgacc

SEQ ID NO: 473043 - DNA, 122 bp, Homo sapiens; identical to SEQ ID NO: 355903
  chr18:77628470-77628592
  hypo
  ovary vs. head_and_neck

SEQ ID NO: 473044 - DNA, 145 bp, Homo sapiens; identical to SEQ ID NO: 461697
  chr18:77644520-77644665
  hypo
  ovary vs. liver_bileduct

SEQ ID NO: 473045 - DNA, 39 bp, Homo sapiens; identical to SEQ ID NO: 367695
  chr18:77644881-77644920
  hypo
  ovary vs. liver_bileduct

SEQ ID NO: 473046 - DNA, 54 bp, Homo sapiens; identical to SEQ ID NO: 355909
  chr19:403809-403863
  hypo
  ovary vs. renal,non_cancer,lymphoid_neoplasm,thyroid

SEQ ID NO: 473047 - DNA, 53 bp, Homo sapiens; identical to SEQ ID NO: 355910
  chr19:407832-407885
  hypo
  ovary vs. lymphoid_neoplasm

SEQ ID NO: 473048 - DNA, 805 bp, Homo sapiens; identical to SEQ ID NO: 367702
  chr19:418255-419060
  hypo
  ovary vs. colorectal,pancreas_gallbladder,prostate,renal

SEQ ID NO: 473049 - DNA, 99 bp, Homo sapiens; identical to SEQ ID NO: 454948
  chr19:549193-549292
  hypo
  ovary vs. renal,myeloid_neoplasm,thyroid,cervical, non_cancer

SEQ ID NO: 473050 - DNA, 2 bp, Homo sapiens
  chr19:550028-550030
  hypo
  ovary vs. renal,myeloid_neoplasm,thyroid,cervical, non_cancer
ac

SEQ ID NO: 473051 - DNA, 159 bp, Homo sapiens; identical to SEQ ID NO: 453776
  chr19:883424-883583
  hypo
  ovary vs. sarcoma

SEQ ID NO: 473052 - DNA, 45 bp, Homo sapiens; identical to SEQ ID NO: 453777
  chr19:884311-884356
  hypo
  ovary vs. sarcoma

SEQ ID NO: 473053 - DNA, 1 bp, Homo sapiens
  chr19:900808-900809
  hypo
  ovary vs. sarcoma,multiple_myeloma,uterine,cervical, bladder_and_urothelial,myeloid_neoplasm,non_cancer,renal, lymphoid_neoplasm,anorectal
c

SEQ ID NO: 473054 - DNA, 167 bp, Homo sapiens; identical to SEQ ID NO: 348910
  chr19:901066-901233
  hypo
  ovary vs. sarcoma,multiple_myeloma,uterine,cervical, bladder_and_urothelial,myeloid_neoplasm,non_cancer,renal, lymphoid_neoplasm,anorectal

SEQ ID NO: 473055 - DNA, 743 bp, Homo sapiens; identical to SEQ ID NO: 335871
  chr19:941824-942567
  hypo
  ovary vs. liver_bileduct,lung,colorectal

SEQ ID NO: 473056 - DNA, 68 bp, Homo sapiens; identical to SEQ ID NO: 348912
  chr19:956638-956706
  hypo
  ovary vs. thyroid,sarcoma,melanoma,prostate,non_cancer, renal,anorectal,multiple_myeloma,cervical,myeloid_neoplasm, uterine,lymphoid_neoplasm,lung

SEQ ID NO: 473057 - DNA, 397 bp, Homo sapiens; identical to SEQ ID NO: 355936
  chr19:1312697-1313094
  hypo
  ovary vs. cervical,upper_gi,prostate, bladder_and_urothelial,colorectal,breast,pancreas_gallbladder, non_cancer,liver_bileduct,lymphoid_neoplasm,uterine

SEQ ID NO: 473058 - DNA, 576 bp, Homo sapiens; identical to SEQ ID NO: 343565
  chr19:1333769-1334345
  hypo
  ovary vs. breast

SEQ ID NO: 473059 - DNA, 243 bp, Homo sapiens; identical to SEQ ID NO: 453781
  chr19:1911845-1912088
  hypo
  ovary vs. sarcoma,renal,liver_bileduct,melanoma, lymphoid_neoplasm,bladder_and_urothelial

SEQ ID NO: 473060 - DNA, 161 bp, Homo sapiens; identical to SEQ ID NO: 348918
  chr19:1912446-1912607
  hypo
  ovary vs. sarcoma,renal,liver_bileduct,melanoma, lymphoid_neoplasm,bladder_and_urothelial

SEQ ID NO: 473061 - DNA, 659 bp, Homo sapiens; identical to SEQ ID NO: 355950
  chr19:1912446-1913105
  hypo
  ovary vs. liver_bileduct

SEQ ID NO: 473062 - DNA, 407 bp, Homo sapiens; identical to SEQ ID NO: 382307
  chr19:3770610-3771017
  hypo
  ovary vs. upper_gi,multiple_myeloma, bladder_and_urothelial

SEQ ID NO: 473063 - DNA, 29 bp, Homo sapiens
  chr19:3907689-3907718
  hypo
  ovary vs. anorectal
cggactctggcgtccatgcgactctccgc

SEQ ID NO: 473064 - DNA, 326 bp, Homo sapiens; identical to SEQ ID NO: 382311
  chr19:3907947-3908273
  hypo
  ovary vs. anorectal

SEQ ID NO: 473065 - DNA, 43 bp, Homo sapiens; identical to SEQ ID NO: 367827
  chr19:4550330-4550373
  hypo
  ovary vs. sarcoma

SEQ ID NO: 473066 - DNA, 2 bp, Homo sapiens
  chr19:4557371-4557373
  hypo
  ovary vs. multiple_myeloma,renal,myeloid_neoplasm, prostate
cc

SEQ ID NO: 473067 - DNA, 12 bp, Homo sapiens
  chr19:4816460-4816472
  hypo
  ovary vs. uterine,upper_gi,colorectal, bladder_and_urothelial,head_and_neck,liver_bileduct
cggtgggggggt

SEQ ID NO: 473068 - DNA, 615 bp, Homo sapiens; identical to SEQ ID NO: 355982
  chr19:4816550-4817165
  hypo
  ovary vs. uterine,upper_gi,colorectal, bladder_and_urothelial,head_and_neck,liver_bileduct

SEQ ID NO: 473069 - DNA, 586 bp, Homo sapiens; identical to SEQ ID NO: 343657
  chr19:4817473-4818059
  hypo
  ovary vs. lung,bladder_and_urothelial,liver_bileduct, head_and_neck,uterine,colorectal,pancreas_gallbladder,anorectal, upper_gi,melanoma,cervical,breast

SEQ ID NO: 473070 - DNA, 292 bp, Homo sapiens; identical to SEQ ID NO: 456712
  chr19:5915130-5915422
  hypo
  ovary vs. lymphoid_neoplasm,myeloid_neoplasm,anorectal, melanoma

SEQ ID NO: 473071 - DNA, 406 bp, Homo sapiens; identical to SEQ ID NO: 456713
  chr19:5915520-5915926
  hypo
  ovary vs. lymphoid_neoplasm,myeloid_neoplasm,anorectal, melanoma

SEQ ID NO: 473072 - DNA, 18 bp, Homo sapiens
  chr19:5915969-5915987
  hypo
  ovary vs. lymphoid_neoplasm,myeloid_neoplasm,anorectal, melanoma
ggggtgggggtaaagtgc

SEQ ID NO: 473073 - DNA, 365 bp, Homo sapiens; identical to SEQ ID NO: 456715
  chr19:5915561-5915926
  hypo
  ovary vs. melanoma

SEQ ID NO: 473074 - DNA, 324 bp, Homo sapiens; identical to SEQ ID NO: 367859
  chr19:5915969-5916293
  hypo
  ovary vs. melanoma

SEQ ID NO: 473075 - DNA, 92 bp, Homo sapiens; identical to SEQ ID NO: 343704
  chr19:7682222-7682314
  hypo
  ovary vs. lung

SEQ ID NO: 473076 - DNA, 354 bp, Homo sapiens; identical to SEQ ID NO: 343708
  chr19:7991824-7992178
  hypo
  ovary vs. multiple_myeloma,bladder_and_urothelial, lymphoid_neoplasm,myeloid_neoplasm,head_and_neck,uterine, prostate,cervical,thyroid,colorectal,liver_bileduct,non_cancer, renal,pancreas_gallbladder,melanoma,upper_gi,breast,anorectal,
  CONT. FROM ABOVE: lung

SEQ ID NO: 473077 - DNA, 107 bp, Homo sapiens; identical to SEQ ID NO: 454983
  chr19:9129007-9129114
  hypo
  ovary vs. thyroid,lymphoid_neoplasm

SEQ ID NO: 473078 - DNA, 92 bp, Homo sapiens; identical to SEQ ID NO: 356010
  chr19:9129229-9129321
  hypo
  ovary vs. thyroid,lymphoid_neoplasm

SEQ ID NO: 473079 - DNA, 215 bp, Homo sapiens; identical to SEQ ID NO: 343723
  chr19:9960959-9961174
  hypo
  ovary vs. bladder_and_urothelial,multiple_myeloma

SEQ ID NO: 473080 - DNA, 74 bp, Homo sapiens; identical to SEQ ID NO: 343736
  chr19:10687853-10687927
  hypo
  ovary vs. bladder_and_urothelial,anorectal

SEQ ID NO: 473081 - DNA, 116 bp, Homo sapiens; identical to SEQ ID NO: 452980
  chr19:10691764-10691880
  hypo
  ovary vs. multiple_myeloma,lymphoid_neoplasm,melanoma

SEQ ID NO: 473082 - DNA, 328 bp, Homo sapiens; identical to SEQ ID NO: 460207
  chr19:10823276-10823604
  hypo
  ovary vs. breast,melanoma,sarcoma,prostate

SEQ ID NO: 473083 - DNA, 46 bp, Homo sapiens; identical to SEQ ID NO: 460208
  chr19:10823633-10823679
  hypo
  ovary vs. breast,melanoma,sarcoma,prostate

SEQ ID NO: 473084 - DNA, 192 bp, Homo sapiens; identical to SEQ ID NO: 367918
  chr19:10823721-10823913
  hypo
  ovary vs. breast,melanoma,sarcoma,prostate

SEQ ID NO: 473085 - DNA, 522 bp, Homo sapiens; identical to SEQ ID NO: 343747
  chr19:11001603-11002125
  hypo
  ovary vs. melanoma

SEQ ID NO: 473086 - DNA, 177 bp, Homo sapiens; identical to SEQ ID NO: 356025
  chr19:11003087-11003264
  hypo
  ovary vs. renal,lymphoid_neoplasm,liver_bileduct, prostate,non_cancer,melanoma,multiple_myeloma,thyroid

SEQ ID NO: 473087 - DNA, 444 bp, Homo sapiens; identical to SEQ ID NO: 367923
  chr19:11004773-11005217
  hypo
  ovary vs. liver_bileduct

SEQ ID NO: 473088 - DNA, 5 bp, Homo sapiens
  chr19:11658618-11658623
  hypo
  ovary vs. sarcoma,uterine,breast,melanoma
cgaaa

SEQ ID NO: 473089 - DNA, 97 bp, Homo sapiens; identical to SEQ ID NO: 343810
  chr19:15382528-15382625
  hypo
  ovary vs. liver_bileduct,upper_gi,lung,head_and_neck

SEQ ID NO: 473090 - DNA, 67 bp, Homo sapiens; identical to SEQ ID NO: 456741
  chr19:16638602-16638669
  hypo
  ovary vs. thyroid,uterine,lymphoid_neoplasm,renal, multiple_myeloma,non_cancer,colorectal

SEQ ID NO: 473091 - DNA, 149 bp, Homo sapiens
  chr19:17757928-17758077
  hypo
  ovary vs. sarcoma,pancreas_gallbladder,head_and_neck, cervical,bladder_and_urothelial,breast,anorectal,colorectal
cgtgcacacacggagatgagatggaatgcacccgaccgagtgagtgcgcgctgcaaaggagagggaccaggccatgggacagggcatgagacaggtctcagagggtggagaaggaggggccctatggcggcccacgccccctcaccggt

SEQ ID NO: 473092 - DNA, 96 bp, Homo sapiens; identical to SEQ ID NO: 367994
  chr19:17758133-17758229
  hypo
  ovary vs. sarcoma,pancreas_gallbladder,head_and_neck, cervical,bladder_and_urothelial,breast,anorectal,colorectal

SEQ ID NO: 473093 - DNA, 803 bp, Homo sapiens; identical to SEQ ID NO: 458799
  chr19:17837853-17838656
  hypo
  ovary vs. uterine,liver_bileduct,pancreas_gallbladder, head_and_neck,breast,renal,upper_gi,multiple_myeloma

SEQ ID NO: 473094 - DNA, 825 bp, Homo sapiens; identical to SEQ ID NO: 346207
  chr19:17838219-17839044
  hypo
  ovary vs. uterine,head_and_neck,pancreas_gallbladder, liver_bileduct,renal,breast,bladder_and_urothelial,upper_gi, lung,melanoma,multiple_myeloma,myeloid_neoplasm,sarcoma, colorectal,thyroid,lymphoid_neoplasm,prostate

SEQ ID NO: 473095 - DNA, 48 bp, Homo sapiens
  chr19:18126529-18126577
  hypo
  ovary vs. liver_bileduct,breast,cervical,colorectal, melanoma
cgcggatggacatctgggttgtttccacggcttggctatagtgaatct

SEQ ID NO: 473096 - DNA, 41 bp, Homo sapiens; identical to SEQ ID NO: 368001
  chr19:18126606-18126647
  hypo
  ovary vs. liver_bileduct,breast,cervical,colorectal, melanoma

SEQ ID NO: 473097 - DNA, 369 bp, Homo sapiens
  chr19:18856011-18856380
  hypo
  ovary vs. uterine,upper_gi,bladder_and_urothelial, colorectal,liver_bileduct,cervical,lung,breast,renal,melanoma
cggaaggcgcctgtacttggctctggtggtgcctggagtgcctggaggaggctgcgggggagggtgtgtgggggccgcgtctcaatcaagagcagccctgggctccacaaggaagcctcccaggaactcgcgcttggccaggtgggccccgaaacagtcctgggctggaagcccctgggctgtctcttggcaggcccctccagggatgacgtaggtgggggtaggaggccgtccaggcccggagagagagggcggaggcctgtctgcacctggtgagactggggaggagggctgcctaggccggctacatccctggcacccggcgggcgctggccccgagcttgtgccgctctgcctggcctgtgcatg

SEQ ID NO: 473098 - DNA, 329 bp, Homo sapiens; identical to SEQ ID NO: 356082
  chr19:18856409-18856738
  hypo
  ovary vs. uterine,upper_gi,bladder_and_urothelial, colorectal,liver_bileduct,cervical,lung,breast,renal,melanoma

SEQ ID NO: 473099 - DNA, 4 bp, Homo sapiens
  chr19:18880002-18880006
  hypo
  ovary vs. head_and_neck
cgag

SEQ ID NO: 473100 - DNA, 270 bp, Homo sapiens; identical to SEQ ID NO: 343867
  chr19:19576172-19576442
  hypo
  ovary vs. uterine,liver_bileduct,upper_gi, pancreas_gallbladder,lung,head_and_neck,colorectal,sarcoma, anorectal,melanoma,bladder_and_urothelial,prostate, lymphoid_neoplasm,breast,myeloid_neoplasm,renal,cervical,
  CONT. FROM ABOVE: non_cancer

SEQ ID NO: 473101 - DNA, 149 bp, Homo sapiens; identical to SEQ ID NO: 343872
  chr19:19719325-19719474
  hypo
  ovary vs. lung

SEQ ID NO: 473102 - DNA, 164 bp, Homo sapiens; identical to SEQ ID NO: 343901
  chr19:32374316-32374480
  hypo
  ovary vs. colorectal

SEQ ID NO: 473103 - DNA, 144 bp, Homo sapiens
  chr19:32898192-32898336
  hypo
  ovary vs. anorectal,myeloid_neoplasm,head_and_neck, bladder_and_urothelial,lymphoid_neoplasm,renal,non_cancer, cervical,uterine
cgacgctccctgggatagcagctgccctgattggcacacccccgcagtcatcaccactgaggcgtattcctgaagctgccagtgtgaattgttttatagaacactggtgttaaaattcaggtacctgagacaaaacaatatttt

SEQ ID NO: 473104 - DNA, 219 bp, Homo sapiens; identical to SEQ ID NO: 348969
  chr19:32898490-32898709
  hypo
  ovary vs. anorectal,myeloid_neoplasm,head_and_neck, bladder_and_urothelial,lymphoid_neoplasm,renal,non_cancer, cervical,uterine

SEQ ID NO: 473105 - DNA, 25 bp, Homo sapiens
  chr19:33996103-33996128
  hypo
  ovary vs. liver_bileduct,head_and_neck
cgcggcccggcctgccttcagctac

SEQ ID NO: 473106 - DNA, 248 bp, Homo sapiens; identical to SEQ ID NO: 356116
  chr19:33996157-33996405
  hypo
  ovary vs. liver_bileduct,head_and_neck

SEQ ID NO: 473107 - DNA, 73 bp, Homo sapiens; identical to SEQ ID NO: 465392
  chr19:38828044-38828117
  hypo
  ovary vs. bladder_and_urothelial

SEQ ID NO: 473108 - DNA, 133 bp, Homo sapiens; identical to SEQ ID NO: 190110
  chr19:38901796-38901929
  hypo
  ovary vs. uterine,cervical,breast,anorectal, pancreas_gallbladder,colorectal,prostate

SEQ ID NO: 473109 - DNA, 75 bp, Homo sapiens; identical to SEQ ID NO: 356167
  chr19:45810267-45810342
  hypo
  ovary vs. melanoma,renal

SEQ ID NO: 473110 - DNA, 59 bp, Homo sapiens; identical to SEQ ID NO: 456780
  chr19:46321120-46321179
  hypo
  ovary vs. myeloid_neoplasm,thyroid, bladder_and_urothelial,non_cancer,pancreas_gallbladder, colorectal,prostate,head_and_neck,upper_gi,uterine

SEQ ID NO: 473111 - DNA, 110 bp, Homo sapiens; identical to SEQ ID NO: 356171
  chr19:46321422-46321532
  hypo
  ovary vs. myeloid_neoplasm,thyroid, bladder_and_urothelial,non_cancer,pancreas_gallbladder, colorectal,prostate,head_and_neck,upper_gi,uterine

SEQ ID NO: 473112 - DNA, 369 bp, Homo sapiens; identical to SEQ ID NO: 344021
  chr19:46885301-46885670
  hypo
  ovary vs. lung,head_and_neck,cervical,upper_gi,uterine, pancreas_gallbladder,bladder_and_urothelial

SEQ ID NO: 473113 - DNA, 95 bp, Homo sapiens
  chr19:49012390-49012485
  hypo
  ovary vs. bladder_and_urothelial,breast,uterine, pancreas_gallbladder,anorectal,colorectal,sarcoma,cervical
cgggcccagaatccgatggacgcagggacggatggaaggatggacagacggacggacgcgtggagagccgggtggcgcggcggagtggtcaatgg

SEQ ID NO: 473114 - DNA, 3 bp, Homo sapiens
  chr19:49012514-49012517
  hypo
  ovary vs. bladder_and_urothelial,breast,uterine, pancreas_gallbladder,anorectal,colorectal,sarcoma,cervical
gtc

SEQ ID NO: 473115 - DNA, 233 bp, Homo sapiens; identical to SEQ ID NO: 368219
  chr19:53507269-53507502
  hypo
  ovary vs. head_and_neck,anorectal,colorectal

SEQ ID NO: 473116 - DNA, 386 bp, Homo sapiens; identical to SEQ ID NO: 356217
  chr19:55990556-55990942
  hypo
  ovary vs. upper_gi,head_and_neck,lung,breast, bladder_and_urothelial

SEQ ID NO: 473117 - DNA, 150 bp, Homo sapiens
  chr19:56201494-56201644
  hypo
  ovary vs. melanoma,lung,anorectal,liver_bileduct, colorectal,cervical,thyroid,breast,upper_gi,head_and_neck, prostate,pancreas_gallbladder,uterine,bladder_and_urothelial, sarcoma,myeloid_neoplasm,non_cancer,multiple_myeloma
cggtgactgaccaggctgccctgcggccacctcctgtggtcagcgctggccatcccccttcgggctgagcaccgtgagggccaccaccggccgccacagctgaatggggaggcccagaataggccaacagcctggcatggccacagggag

SEQ ID NO: 473118 - DNA, 54 bp, Homo sapiens; identical to SEQ ID NO: 456800
  chr19:58964127-58964181
  hypo
  ovary vs. liver_bileduct,melanoma,renal, pancreas_gallbladder,multiple_myeloma,cervical,non_cancer, lymphoid_neoplasm,prostate

SEQ ID NO: 473119 - DNA, 228 bp, Homo sapiens; identical to SEQ ID NO: 337485
  chr2:2769802-2770030
  hypo
  ovary vs. uterine,head_and_neck,cervical

SEQ ID NO: 473120 - DNA, 100 bp, Homo sapiens; identical to SEQ ID NO: 353056
  chr2:8736064-8736164
  hypo
  ovary vs. head_and_neck,liver_bileduct,lung, bladder_and_urothelial,anorectal,colorectal,breast, pancreas_gallbladder

SEQ ID NO: 473121 - DNA, 60 bp, Homo sapiens; identical to SEQ ID NO: 458848
  chr2:8978298-8978358
  hypo
  ovary vs. multiple_myeloma,renal,thyroid,non_cancer, melanoma,lymphoid_neoplasm,prostate,liver_bileduct, myeloid_neoplasm,uterine

SEQ ID NO: 473122 - DNA, 372 bp, Homo sapiens; identical to SEQ ID NO: 337522
  chr2:9609477-9609849
  hypo
  ovary vs. uterine,lung,colorectal,renal, pancreas_gallbladder,upper_gi,cervical,bladder_and_urothelial, breast,head_and_neck,liver_bileduct,prostate,lymphoid_neoplasm, sarcoma

SEQ ID NO: 473123 - DNA, 63 bp, Homo sapiens; identical to SEQ ID NO: 455051
  chr2:10156251-10156314
  hypo
  ovary vs. sarcoma

SEQ ID NO: 473124 - DNA, 614 bp, Homo sapiens; identical to SEQ ID NO: 337537
  chr2:10334473-10335087
  hypo
  ovary vs. pancreas_gallbladder,cervical,breast,upper_gi

SEQ ID NO: 473125 - DNA, 473 bp, Homo sapiens; identical to SEQ ID NO: 337541
  chr2:10566948-10567421
  hypo
  ovary vs. uterine

SEQ ID NO: 473126 - DNA, 80 bp, Homo sapiens; identical to SEQ ID NO: 337542
  chr2:10580386-10580466
  hypo
  ovary vs. anorectal,bladder_and_urothelial

SEQ ID NO: 473127 - DNA, 55 bp, Homo sapiens; identical to SEQ ID NO: 347881
  chr2:10600813-10600868
  hypo
  ovary vs. anorectal

SEQ ID NO: 473128 - DNA, 426 bp, Homo sapiens; identical to SEQ ID NO: 337553
  chr2:15307089-15307515
  hypo
  ovary vs. bladder_and_urothelial,liver_bileduct,uterine, renal,cervical,upper_gi,head_and_neck,pancreas_gallbladder, sarcoma,lung,lymphoid_neoplasm,breast,thyroid,colorectal, myeloid_neoplasm,melanoma

SEQ ID NO: 473129 - DNA, 101 bp, Homo sapiens; identical to SEQ ID NO: 353080
  chr2:15783084-15783185
  hypo
  ovary vs. lung,colorectal

SEQ ID NO: 473130 - DNA, 431 bp, Homo sapiens; identical to SEQ ID NO: 337556
  chr2:16124561-16124992
  hypo
  ovary vs. upper_gi

SEQ ID NO: 473131 - DNA, 225 bp, Homo sapiens; identical to SEQ ID NO: 337586
  chr2:28065720-28065945
  hypo
  ovary vs. liver_bileduct,lung,upper_gi

SEQ ID NO: 473132 - DNA, 66 bp, Homo sapiens; identical to SEQ ID NO: 471985
  chr2:47200517-47200583
  hypo
  ovary vs. sarcoma,pancreas_gallbladder,liver_bileduct, uterine,anorectal,lung,upper_gi,bladder_and_urothelial

SEQ ID NO: 473133 - DNA, 45 bp, Homo sapiens
  chr2:62497691-62497736
  hypo
  ovary vs. lymphoid_neoplasm,colorectal,renal,cervical, pancreas_gallbladder,melanoma,head_and_neck,myeloid_neoplasm
cgacagagcgagactccgtctcaaaaaaaaaaagaaaagaaatag

SEQ ID NO: 473134 - DNA, 123 bp, Homo sapiens; identical to SEQ ID NO: 455068
  chr2:69928507-69928630
  hypo
  ovary vs. melanoma,sarcoma,breast,upper_gi,renal

SEQ ID NO: 473135 - DNA, 346 bp, Homo sapiens; identical to SEQ ID NO: 337646
  chr2:72359340-72359686
  hypo
  ovary vs. breast

SEQ ID NO: 473136 - DNA, 61 bp, Homo sapiens; identical to SEQ ID NO: 347902
  chr2:85280346-85280407
  hypo
  ovary vs. liver_bileduct,sarcoma,head_and_neck

SEQ ID NO: 473137 - DNA, 343 bp, Homo sapiens
  chr2:85890530-85890873
  hypo
  ovary vs. uterine,colorectal,sarcoma,renal,melanoma, pancreas_gallbladder,bladder_and_urothelial,liver_bileduct, upper_gi,myeloid_neoplasm,thyroid
cgctgctgttcccggcctgggtggtcacggacatgcagaggtggcactcagagtctcgcggcagccattctcctgtcggcgaccctggagatgtgagcattagggggaaagcaggcaaggccaccctacagaggtgtttggtttctgtcctccttggtgcattgcagtgggaccacagagggagagggtcatgcagtggcagggtagggggaggaggagagcaggcattgggctaaggagtgggcagtgggctcacttgggccagcgctgtcatccatggagcaccggaggacgaggcggcagaccagctggggcagcatgcggcccagcagcgtgtcgagca

SEQ ID NO: 473138 - DNA, 81 bp, Homo sapiens; identical to SEQ ID NO: 353128
  chr2:85890902-85890983
  hypo
  ovary vs. uterine,colorectal,sarcoma,renal,melanoma, pancreas_gallbladder,bladder_and_urothelial,liver_bileduct, upper_gi,myeloid_neoplasm,thyroid

SEQ ID NO: 473139 - DNA, 185 bp, Homo sapiens; identical to SEQ ID NO: 362930
  chr2:97437985-97438170
  hypo
  ovary vs. melanoma

SEQ ID NO: 473140 - DNA, 73 bp, Homo sapiens; identical to SEQ ID NO: 353153
  chr2:109260013-109260086
  hypo
  ovary vs. lung,head_and_neck,upper_gi, pancreas_gallbladder,bladder_and_urothelial

SEQ ID NO: 473141 - DNA, 187 bp, Homo sapiens; identical to SEQ ID NO: 470393
  chr2:110015134-110015321
  hypo
  ovary vs. head_and_neck,breast,colorectal, lymphoid_neoplasm,lung,thyroid,prostate,sarcoma,cervical, pancreas_gallbladder,uterine,non_cancer

SEQ ID NO: 473142 - DNA, 112 bp, Homo sapiens; identical to SEQ ID NO: 353157
  chr2:110015364-110015476
  hypo
  ovary vs. head_and_neck,breast,colorectal, lymphoid_neoplasm,lung,thyroid,prostate,sarcoma,cervical, pancreas_gallbladder,uterine,non_cancer

SEQ ID NO: 473143 - DNA, 121 bp, Homo sapiens; identical to SEQ ID NO: 337727
  chr2:111929192-111929313
  hypo
  ovary vs. sarcoma

SEQ ID NO: 473144 - DNA, 682 bp, Homo sapiens; identical to SEQ ID NO: 337730
  chr2:114736479-114737161
  hypo
  ovary vs. lung,cervical,sarcoma,head_and_neck, pancreas_gallbladder,anorectal,bladder_and_urothelial, colorectal,prostate,thyroid,uterine,melanoma,myeloid_neoplasm, non_cancer,breast,multiple_myeloma,upper_gi,liver_bileduct

SEQ ID NO: 473145 - DNA, 213 bp, Homo sapiens; identical to SEQ ID NO: 362977
  chr2:121549381-121549594
  hypo
  ovary vs. colorectal,prostate,lymphoid_neoplasm

SEQ ID NO: 473146 - DNA, 174 bp, Homo sapiens; identical to SEQ ID NO: 337769
  chr2:132269055-132269229
  hypo
  ovary vs. sarcoma,head_and_neck,upper_gi

SEQ ID NO: 473147 - DNA, 126 bp, Homo sapiens; identical to SEQ ID NO: 337793
  chr2:159994731-159994857
  hypo
  ovary vs. lung,head_and_neck

SEQ ID NO: 473148 - DNA, 83 bp, Homo sapiens
  chr2:170282893-170282976
  hypo
  ovary vs. sarcoma,melanoma,anorectal,cervical
cgaacctgaagttgccagtgtgaagcccgtgagtgtgcagtgaaccgcagagaaagcttcttggtgagttgagtttgtggagt

SEQ ID NO: 473149 - DNA, 18 bp, Homo sapiens
  chr2:170283080-170283098
  hypo
  ovary vs. sarcoma,melanoma,anorectal,cervical
ttccccagccctctcacc

SEQ ID NO: 473150 - DNA, 133 bp, Homo sapiens; identical to SEQ ID NO: 337806
  chr2:171730981-171731114
  hypo
  ovary vs. liver_bileduct,upper_gi,head_and_neck, colorectal,pancreas_gallbladder,cervical,bladder_and_urothelial, lung,anorectal

SEQ ID NO: 473151 - DNA, 188 bp, Homo sapiens
  chr2:209224972-209225160
  hypo
  ovary vs. multiple_myeloma,uterine,renal,colorectal, melanoma,lung,pancreas_gallbladder,lymphoid_neoplasm,cervical, prostate,non_cancer,thyroid
cgccccacttgttctcccgccttctgcgtgagcagcccctacggggtctcctactggtccctaggaactttcgccacacccggagcggcggcctccccgagcccctcggggccccttccctggcagctgggatgagggcagcgtgctcctcgcaggttacttggtcctgaggtcctccctcaggcgct

SEQ ID NO: 473152 - DNA, 479 bp, Homo sapiens; identical to SEQ ID NO: 353216
  chr2:209225393-209225872
  hypo
  ovary vs. multiple_myeloma,uterine,renal,colorectal, melanoma,lung,pancreas_gallbladder,lymphoid_neoplasm,cervical, prostate,non_cancer,thyroid

SEQ ID NO: 473153 - DNA, 173 bp, Homo sapiens; identical to SEQ ID NO: 337928
  chr2:237542540-237542713
  hypo
  ovary vs. head_and_neck

SEQ ID NO: 473154 - DNA, 67 bp, Homo sapiens; identical to SEQ ID NO: 347954
  chr2:239082208-239082275
  hypo
  ovary vs. liver_bileduct,breast,sarcoma

SEQ ID NO: 473155 - DNA, 34 bp, Homo sapiens; identical to SEQ ID NO: 337940
  chr2:239096420-239096454
  hypo
  ovary vs. lung

SEQ ID NO: 473156 - DNA, 448 bp, Homo sapiens; identical to SEQ ID NO: 337943
  chr2:239800534-239800982
  hypo
  ovary vs. anorectal

SEQ ID NO: 473157 - DNA, 121 bp, Homo sapiens
  chr2:240167455-240167576
  hypo
  ovary vs. melanoma,lymphoid_neoplasm, bladder_and_urothelial
cgagcctgcccccaccttctattcaatatgtctttcctgagcatctgctgggtgatctacctaacttgttccttcacgaatatcccaacagtcttcagttcatccccagcccctatgtgtt

SEQ ID NO: 473158 - DNA, 310 bp, Homo sapiens; identical to SEQ ID NO: 353257
  chr2:240167605-240167915
  hypo
  ovary vs. melanoma,lymphoid_neoplasm, bladder_and_urothelial

SEQ ID NO: 473159 - DNA, 288 bp, Homo sapiens; identical to SEQ ID NO: 456832
  chr2:240226690-240226978
  hypo
  ovary vs. melanoma,anorectal,thyroid,colorectal, bladder_and_urothelial,renal,upper_gi,lymphoid_neoplasm, pancreas_gallbladder

SEQ ID NO: 473160 - DNA, 154 bp, Homo sapiens; identical to SEQ ID NO: 347957
  chr2:240227007-240227161
  hypo
  ovary vs. melanoma,anorectal,thyroid,colorectal, bladder_and_urothelial,renal,upper_gi,lymphoid_neoplasm, pancreas_gallbladder

SEQ ID NO: 473161 - DNA, 80 bp, Homo sapiens; identical to SEQ ID NO: 337957
  chr2:240319796-240319876
  hypo
  ovary vs. liver_bileduct,cervical,anorectal,breast, melanoma,pancreas_gallbladder,upper_gi,lung,colorectal,thyroid

SEQ ID NO: 473162 - DNA, 26 bp, Homo sapiens
  chr2:240658158-240658184
  hypo
  ovary vs. cervical,prostate,thyroid,non_cancer,anorectal, sarcoma,pancreas_gallbladder,lymphoid_neoplasm,colorectal, myeloid_neoplasm,breast,melanoma
cgtctccttggtgaggtcgcgtggag

SEQ ID NO: 473163 - DNA, 463 bp, Homo sapiens; identical to SEQ ID NO: 455098
  chr2:242004407-242004870
  hypo
  ovary vs. sarcoma,breast,prostate,non_cancer,cervical, lymphoid_neoplasm,myeloid_neoplasm,multiple_myeloma,melanoma, pancreas_gallbladder,liver_bileduct,anorectal,colorectal,lung

SEQ ID NO: 473164 - DNA, 339 bp, Homo sapiens; identical to SEQ ID NO: 337986
  chr2:242169887-242170226
  hypo

SEQ ID NO: 473165 - DNA, 47 bp, Homo sapiens; identical to SEQ ID NO: 461832
  chr2:242554503-242554550
  hypo
  ovary vs. liver_bileduct,renal,myeloid_neoplasm,thyroid, lymphoid_neoplasm,multiple_myeloma,melanoma, bladder_and_urothelial,breast,non_cancer

SEQ ID NO: 473166 - DNA, 54 bp, Homo sapiens; identical to SEQ ID NO: 347965
  chr2:242554624-242554678
  hypo
  ovary vs. liver_bileduct,renal,myeloid_neoplasm,thyroid, lymphoid_neoplasm,multiple_myeloma,melanoma, bladder_and_urothelial,breast,non_cancer

SEQ ID NO: 473167 - DNA, 23 bp, Homo sapiens
  chr2:242925474-242925497
  hypo
  ovary vs. sarcoma,lymphoid_neoplasm,thyroid,renal, anorectal
cgtccacaatctagtggatgaat

SEQ ID NO: 473168 - DNA, 180 bp, Homo sapiens; identical to SEQ ID NO: 353284
  chr2:242925676-242925856
  hypo
  ovary vs. sarcoma,lymphoid_neoplasm,thyroid,renal, anorectal

SEQ ID NO: 473169 - DNA, 10 bp, Homo sapiens
  chr2:242933420-242933430
  hypo
  ovary vs. breast,pancreas_gallbladder,prostate, colorectal
cggtttggat

SEQ ID NO: 473170 - DNA, 212 bp, Homo sapiens; identical to SEQ ID NO: 353285
  chr2:242933459-242933671
  hypo
  ovary vs. breast,pancreas_gallbladder,prostate, colorectal

SEQ ID NO: 473171 - DNA, 93 bp, Homo sapiens; identical to SEQ ID NO: 356232
  chr20:400189-400282
  hypo
  ovary vs. uterine,myeloid_neoplasm,melanoma,thyroid, multiple_myeloma

SEQ ID NO: 473172 - DNA, 102 bp, Homo sapiens; identical to SEQ ID NO: 465477
  chr20:400915-401017
  hypo
  ovary vs. sarcoma,melanoma,myeloid_neoplasm,thyroid

SEQ ID NO: 473173 - DNA, 172 bp, Homo sapiens; identical to SEQ ID NO: 344154
  chr20:926459-926631
  hypo
  ovary vs. pancreas_gallbladder,prostate, bladder_and_urothelial,colorectal

SEQ ID NO: 473174 - DNA, 266 bp, Homo sapiens; identical to SEQ ID NO: 458908
  chr20:3202153-3202419
  hypo
  ovary vs. uterine,bladder_and_urothelial, lymphoid_neoplasm

SEQ ID NO: 473175 - DNA, 4 bp, Homo sapiens
  chr20:18489643-18489647
  hypo
  ovary vs. multiple_myeloma,sarcoma
cgtg

SEQ ID NO: 473176 - DNA, 113 bp, Homo sapiens; identical to SEQ ID NO: 344193
  chr20:30139516-30139629
  hypo
  ovary vs. lung,upper_gi

SEQ ID NO: 473177 - DNA, 35 bp, Homo sapiens
  chr20:30864847-30864882
  hypo
  ovary vs. thyroid,renal,non_cancer,sarcoma,prostate
cgggagccaccgcacctggccgcatgatctgtttt

SEQ ID NO: 473178 - DNA, 71 bp, Homo sapiens; identical to SEQ ID NO: 344213
  chr20:32669113-32669184
  hypo
  ovary vs. liver_bileduct,lung,head_and_neck, bladder_and_urothelial,uterine,pancreas_gallbladder,anorectal, melanoma,upper_gi,breast,sarcoma,cervical

SEQ ID NO: 473179 - DNA, 10 bp, Homo sapiens
  chr20:35089017-35089027
  hypo
  ovary vs. non_cancer,uterine,renal,cervical,prostate, thyroid,myeloid_neoplasm,melanoma,lung,bladder_and_urothelial, sarcoma,multiple_myeloma
cgtctggcag

SEQ ID NO: 473180 - DNA, 87 bp, Homo sapiens; identical to SEQ ID NO: 344224
  chr20:35441137-35441224
  hypo
  ovary vs. pancreas_gallbladder

SEQ ID NO: 473181 - DNA, 436 bp, Homo sapiens
  chr20:35443740-35444176
  hypo
  ovary vs. liver_bileduct
cgctgttgtcgggggcctcatgcagccggaagtcagcacactcgttgtccagacacagccggaggccagccgtgaagccattggcatcagccaccaggacatcgatggccttactgaccagggcggcctgctctctcagcccaggcagcacctcggcctccctggctctgcagagtcggaccgcatgggactcgtgtgtctcgcccaggggagcaggcacacactgggcagagtccccggcctcggcgtccgtctccagcatgggccgcgtactctggcaggaggcgaggtcacagcgctggaggttggagaggagcacgcggttctcgtactgcagcttcttgaccttgccgctgagctcgccgatctgcagcttggcggccgccagctcctcctgtgaaggttcgctgagcacagaacaactgtcctccgacag

SEQ ID NO: 473182 - DNA, 381 bp, Homo sapiens; identical to SEQ ID NO: 346230
  chr20:35444205-35444586
  hypo
  ovary vs. liver_bileduct

SEQ ID NO: 473183 - DNA, 138 bp, Homo sapiens; identical to SEQ ID NO: 344240
  chr20:37673303-37673441
  hypo
  ovary vs. uterine,liver_bileduct,upper_gi,head_and_neck, pancreas_gallbladder,lung,bladder_and_urothelial,colorectal, sarcoma,breast,renal,lymphoid_neoplasm,cervical

SEQ ID NO: 473184 - DNA, 523 bp, Homo sapiens; identical to SEQ ID NO: 344242
  chr20:39990769-39991292
  hypo

SEQ ID NO: 473185 - DNA, 55 bp, Homo sapiens; identical to SEQ ID NO: 368349
  chr20:42833281-42833336
  hypo
  ovary vs. multiple_myeloma,lymphoid_neoplasm

SEQ ID NO: 473186 - DNA, 2 bp, Homo sapiens
  chr20:46823362-46823364
  hypo
  ovary vs. lymphoid_neoplasm
cg

SEQ ID NO: 473187 - DNA, 93 bp, Homo sapiens; identical to SEQ ID NO: 356291
  chr20:46823583-46823676
  hypo
  ovary vs. lymphoid_neoplasm

SEQ ID NO: 473188 - DNA, 50 bp, Homo sapiens; identical to SEQ ID NO: 356294
  chr20:47766299-47766349
  hypo
  ovary vs. upper_gi,cervical,breast,head_and_neck,lung

SEQ ID NO: 473189 - DNA, 21 bp, Homo sapiens
  chr20:47836982-47837003
  hypo
  ovary vs. anorectal,cervical,myeloid_neoplasm,thyroid, prostate,renal,multiple_myeloma,uterine,liver_bileduct, non_cancer,breast
cgcttagcagcagagggatct

SEQ ID NO: 473190 - DNA, 36 bp, Homo sapiens; identical to SEQ ID NO: 349028
  chr20:47837206-47837242
  hypo
  ovary vs. anorectal,cervical,myeloid_neoplasm,thyroid, prostate,renal,multiple_myeloma,uterine,liver_bileduct, non_cancer,breast

SEQ ID NO: 473191 - DNA, 165 bp, Homo sapiens; identical to SEQ ID NO: 472562
  chr20:48771177-48771342
  hypo
  ovary vs. multiple_myeloma,melanoma,lymphoid_neoplasm, non_cancer,thyroid,myeloid_neoplasm,lung,bladder_and_urothelial, prostate,breast,sarcoma,cervical,liver_bileduct,uterine, colorectal,renal,head_and_neck,pancreas_gallbladder

SEQ ID NO: 473192 - DNA, 18 bp, Homo sapiens
  chr20:49286725-49286743
  hypo
  ovary vs. myeloid_neoplasm,prostate,melanoma
cgctctgagccaaggtag

SEQ ID NO: 473193 - DNA, 162 bp, Homo sapiens; identical to SEQ ID NO: 344300
  chr20:52214819-52214981
  hypo
  ovary vs. myeloid_neoplasm,sarcoma

SEQ ID NO: 473194 - DNA, 209 bp, Homo sapiens; identical to SEQ ID NO: 344301
  chr20:52234410-52234619
  hypo
  ovary vs. melanoma

SEQ ID NO: 473195 - DNA, 363 bp, Homo sapiens; identical to SEQ ID NO: 344309
  chr20:56126192-56126555
  hypo
  ovary vs. liver_bileduct,breast,bladder_and_urothelial, colorectal,uterine

SEQ ID NO: 473196 - DNA, 91 bp, Homo sapiens; identical to SEQ ID NO: 356315
  chr20:56772299-56772390
  hypo
  ovary vs. sarcoma,melanoma,thyroid,renal,breast, lymphoid_neoplasm,prostate,non_cancer

SEQ ID NO: 473197 - DNA, 214 bp, Homo sapiens
  chr20:56780225-56780439
  hypo
  ovary vs. uterine,colorectal,anorectal,thyroid,prostate
taagacgtcggttccaattcttcagcctctctgcctctgcccctcgccgtggcctcatcggagggaggcatcgctccctgaccctcgactttcagcttggccactcgactcgcttggcttcccacctacagccaggagtgacggcataacaggtctgcgcccgcccctgaagacgcctcccacgtccccgctccccacgtccgcgcccacacct

SEQ ID NO: 473198 - DNA, 61 bp, Homo sapiens
  chr20:56780951-56781012
  hypo
  ovary vs. uterine,colorectal,anorectal,thyroid,prostate
gcacctgaagacgcctcccacgtccccacgtctgcgcccgcacctgaagacgcctcccacg

SEQ ID NO: 473199 - DNA, 96 bp, Homo sapiens; identical to SEQ ID NO: 356318
  chr20:56781104-56781200
  hypo
  ovary vs. uterine,colorectal,anorectal,thyroid,prostate

SEQ ID NO: 473200 - DNA, 200 bp, Homo sapiens; identical to SEQ ID NO: 383016
  chr20:57154974-57155174
  hypo
  ovary vs. anorectal

SEQ ID NO: 473201 - DNA, 428 bp, Homo sapiens; identical to SEQ ID NO: 368418
  chr20:60226081-60226509
  hypo
  ovary vs. anorectal

SEQ ID NO: 473202 - DNA, 58 bp, Homo sapiens; identical to SEQ ID NO: 455118
  chr20:60470129-60470187
  hypo
  ovary vs. thyroid

SEQ ID NO: 473203 - DNA, 77 bp, Homo sapiens; identical to SEQ ID NO: 383046
  chr20:60470257-60470334
  hypo
  ovary vs. thyroid

SEQ ID NO: 473204 - DNA, 37 bp, Homo sapiens; identical to SEQ ID NO: 455120
  chr20:60502550-60502587
  hypo
  ovary vs. thyroid,renal,non_cancer

SEQ ID NO: 473205 - DNA, 352 bp, Homo sapiens; identical to SEQ ID NO: 383053
  chr20:60511742-60512094
  hypo
  ovary vs. head_and_neck

SEQ ID NO: 473206 - DNA, 271 bp, Homo sapiens; identical to SEQ ID NO: 383073
  chr20:60952110-60952381
  hypo
  ovary vs. bladder_and_urothelial,pancreas_gallbladder, liver_bileduct,lung

SEQ ID NO: 473207 - DNA, 21 bp, Homo sapiens
  chr20:61506536-61506557
  hypo
  ovary vs. thyroid,myeloid_neoplasm,lymphoid_neoplasm, non_cancer,multiple_myeloma,uterine
gtgaattcatcggggagcccc

SEQ ID NO: 473208 - DNA, 124 bp, Homo sapiens; identical to SEQ ID NO: 456878
  chr20:61838301-61838425
  hypo
  ovary vs. lymphoid_neoplasm,anorectal,myeloid_neoplasm, thyroid,non_cancer,head_and_neck,lung,colorectal,prostate, uterine,multiple_myeloma,bladder_and_urothelial,sarcoma, upper_gi

SEQ ID NO: 473209 - DNA, 25 bp, Homo sapiens
  chr20:61838523-61838548
  hypo
  ovary vs. lymphoid_neoplasm,anorectal,myeloid_neoplasm, thyroid,non_cancer,head_and_neck,lung,colorectal,prostate, uterine,multiple_myeloma,bladder_and_urothelial,sarcoma, upper_gi
atacagctgcattaaccccgggcac

SEQ ID NO: 473210 - DNA, 31 bp, Homo sapiens; identical to SEQ ID NO: 356350
  chr20:61991069-61991100
  hypo
  ovary vs. prostate,renal,pancreas_gallbladder,non_cancer, head_and_neck,lymphoid_neoplasm,cervical,myeloid_neoplasm, breast,liver_bileduct

SEQ ID NO: 473211 - DNA, 154 bp, Homo sapiens; identical to SEQ ID NO: 344404
  chr20:62137323-62137477
  hypo
  ovary vs. uterine

SEQ ID NO: 473212 - DNA, 495 bp, Homo sapiens
  chr20:62248627-62249122
  hypo
  ovary vs. lung
cgaccgtgaccttctaagaagtgaaagagaaagatctttctctctccctccctctccatcatgaggacacagcaagaagtcggccatctgcaaggtagaaagcgagtcctcccaacagctgaacctggcagaccctgatcttggacttcagccttcagagctgtaagaaaataactctctgctgttcaggccacgcggtctacggcagcccgagcagactaagacacacgccatctggggagtcagaccagatcaggaagaaaggcctagagctcaggatactgaaggtcccaacccggtgctggaccagaccaccccggcagccgcggccacggagtcacggctcgggtgaggtgacctggacaccatcccggcagccgcggccacggagtcacggctcgggtgaggtgacctggacaccatcccggcagccgcggccacggtgtcacggctcggatgagatgactcggacaccaccccggcagccgcggccac

SEQ ID NO: 473213 - DNA, 130 bp, Homo sapiens; identical to SEQ ID NO: 344413
  chr20:62309958-62310088
  hypo
  ovary vs. lung,cervical,liver_bileduct,anorectal,uterine, upper_gi,bladder_and_urothelial,colorectal,head_and_neck

SEQ ID NO: 473214 - DNA, 22 bp, Homo sapiens
  chr20:62320890-62320912
  hypo
  ovary vs. melanoma,multiple_myeloma,myeloid_neoplasm, sarcoma,renal,prostate,non_cancer,breast,thyroid,uterine
cgtggtgtgattgtcacgggcc

SEQ ID NO: 473215 - DNA, 269 bp, Homo sapiens; identical to SEQ ID NO: 356359
  chr20:62322022-62322291
  hypo
  ovary vs. renal,myeloid_neoplasm,sarcoma, multiple_myeloma,uterine,breast,non_cancer,prostate,melanoma, thyroid

SEQ ID NO: 473216 - DNA, 142 bp, Homo sapiens; identical to SEQ ID NO: 344431
  chr20:62630932-62631074
  hypo
  ovary vs. uterine,breast,pancreas_gallbladder,renal, multiple_myeloma,melanoma,upper_gi,lymphoid_neoplasm,anorectal, myeloid_neoplasm,liver_bileduct,colorectal,prostate,sarcoma, lung,cervical,bladder_and_urothelial,non_cancer

SEQ ID NO: 473217 - DNA, 17 bp, Homo sapiens
  chr20:62631562-62631579
  hypo
  ovary vs. pancreas_gallbladder,breast,prostate, colorectal,melanoma,bladder_and_urothelial,upper_gi, lymphoid_neoplasm,lung,sarcoma,thyroid,cervical,anorectal, liver_bileduct,uterine,multiple_myeloma,renal,non_cancer,
  CONT. FROM ABOVE: myeloid_neoplasm
cagtcacggtggctcac

SEQ ID NO: 473218 - DNA, 55 bp, Homo sapiens; identical to SEQ ID NO: 344444
  chr21:30294975-30295030
  hypo
  ovary vs. liver_bileduct

SEQ ID NO: 473219 - DNA, 130 bp, Homo sapiens; identical to SEQ ID NO: 336552
  chr21:36206762-36206892
  hypo
  ovary vs. lung,colorectal

SEQ ID NO: 473220 - DNA, 316 bp, Homo sapiens; identical to SEQ ID NO: 344464
  chr21:37405019-37405335
  hypo
  ovary vs. liver_bileduct

SEQ ID NO: 473221 - DNA, 174 bp, Homo sapiens; identical to SEQ ID NO: 344471
  chr21:38176483-38176657
  hypo
  ovary vs. head_and_neck,liver_bileduct,anorectal

SEQ ID NO: 473222 - DNA, 79 bp, Homo sapiens; identical to SEQ ID NO: 458947
  chr21:38918381-38918460
  hypo
  ovary vs. anorectal,thyroid

SEQ ID NO: 473223 - DNA, 169 bp, Homo sapiens; identical to SEQ ID NO: 356382
  chr21:38918561-38918730
  hypo
  ovary vs. anorectal,thyroid

SEQ ID NO: 473224 - DNA, 212 bp, Homo sapiens; identical to SEQ ID NO: 344486
  chr21:40891441-40891653
  hypo
  ovary vs. lung,head_and_neck,colorectal, bladder_and_urothelial,renal,melanoma,pancreas_gallbladder, upper_gi,breast

SEQ ID NO: 473225 - DNA, 91 bp, Homo sapiens; identical to SEQ ID NO: 472066
  chr21:42613666-42613757
  hypo
  ovary vs. lymphoid_neoplasm,anorectal,prostate,renal, sarcoma,thyroid,breast,uterine

SEQ ID NO: 473226 - DNA, 82 bp, Homo sapiens; identical to SEQ ID NO: 356390
  chr21:42613819-42613901
  hypo
  ovary vs. lymphoid_neoplasm,anorectal,prostate,renal, sarcoma,thyroid,breast,uterine

SEQ ID NO: 473227 - DNA, 376 bp, Homo sapiens
  chr21:43239707-43240083
  hypo
  ovary vs. lung,bladder_and_urothelial,upper_gi,anorectal, liver_bileduct,pancreas_gallbladder,breast,colorectal,cervical, head_and_neck,melanoma,uterine,prostate,renal,multiple_myeloma, sarcoma,non_cancer
cgctcacatcccctcccagcgccctgcagcagctgagcggcctggctgagcctggcccgtggccctggcgcctgtacccacctttcccacactcggcccgtggccccggcccccgcccccgccacacccaccttccccacactcccagttctcgctcatgtccccttccagcaccctgcagcagggtggcctggctgagcctggcccatgtccccagcacccgtacccacctttcccacactcggcacacaggtactcgcggacattgtcgtgcacacgcatgtgctccttcagcatgtccttcctggcaaaggacttcccacactgctcgcaggcgtggctcttcacacctgagaacacaggcatctgccactca

SEQ ID NO: 473228 - DNA, 243 bp, Homo sapiens; identical to SEQ ID NO: 346252
  chr21:43240112-43240355
  hypo
  ovary vs. lung,bladder_and_urothelial,upper_gi,anorectal, liver_bileduct,pancreas_gallbladder,breast,colorectal,cervical, head_and_neck,melanoma,uterine,prostate,renal,multiple_myeloma, sarcoma,non_cancer

SEQ ID NO: 473229 - DNA, 219 bp, Homo sapiens; identical to SEQ ID NO: 344502
  chr21:43273205-43273424
  hypo
  ovary vs. upper_gi,lung,anorectal,uterine, pancreas_gallbladder,bladder_and_urothelial

SEQ ID NO: 473230 - DNA, 396 bp, Homo sapiens; identical to SEQ ID NO: 356399
  chr21:43547667-43548063
  hypo
  ovary vs. colorectal,lung,breast

SEQ ID NO: 473231 - DNA, 240 bp, Homo sapiens
  chr21:43991061-43991301
  hypo
  ovary vs. liver_bileduct,anorectal,melanoma, bladder_and_urothelial,lymphoid_neoplasm,myeloid_neoplasm, multiple_myeloma,sarcoma,colorectal,cervical,non_cancer
cgcggagctgccgcgcccaccttgatggctgctgcgttacaccagaggcaggaccaggacctgactcctccaggctccactgcccatcagtgcctgctgcctgctcagtgaatggtcaccatggaaacggcgctcaggcctacccacccccaccaccacgccttggtcattgttccttccatgagtgagtgctgcccagcaagacaaagtacaggctccagtgggaaggccaccatgtca

SEQ ID NO: 473232 - DNA, 205 bp, Homo sapiens; identical to SEQ ID NO: 356402
  chr21:43991493-43991698
  hypo
  ovary vs. liver_bileduct,anorectal,melanoma, bladder_and_urothelial,lymphoid_neoplasm,myeloid_neoplasm, multiple_myeloma,sarcoma,colorectal,cervical,non_cancer

SEQ ID NO: 473233 - DNA, 13 bp, Homo sapiens
  chr21:44338162-44338175
  hypo
  ovary vs. renal,pancreas_gallbladder, bladder_and_urothelial,thyroid,uterine,cervical, lymphoid_neoplasm,prostate,colorectal,anorectal,upper_gi, non_cancer,myeloid_neoplasm,multiple_myeloma,sarcoma,
  CONT. FROM ABOVE: liver_bileduct
cgcatagtacact

SEQ ID NO: 473234 - DNA, 119 bp, Homo sapiens; identical to SEQ ID NO: 346254
  chr21:44338552-44338671
  hypo
  ovary vs. renal,pancreas_gallbladder, bladder_and_urothelial,thyroid,uterine,cervical, lymphoid_neoplasm,prostate,colorectal,anorectal,upper_gi, non_cancer,myeloid_neoplasm,multiple_myeloma,sarcoma,
  CONT. FROM ABOVE: liver_bileduct

SEQ ID NO: 473235 - DNA, 209 bp, Homo sapiens; identical to SEQ ID NO: 344516
  chr21:44444714-44444923
  hypo
  ovary vs. lung,pancreas_gallbladder,head_and_neck, colorectal,upper_gi,breast,lymphoid_neoplasm, bladder_and_urothelial,liver_bileduct,melanoma,anorectal, cervical,prostate,uterine,myeloid_neoplasm,non_cancer,thyroid,
  CONT. FROM ABOVE: renal

SEQ ID NO: 473236 - DNA, 15 bp, Homo sapiens
  chr21:44866930-44866945
  hypo
  ovary vs. renal,multiple_myeloma,myeloid_neoplasm
gtgccaggcacctgc

SEQ ID NO: 473237 - DNA, 643 bp, Homo sapiens
  chr21:45400182-45400825
  hypo
  ovary vs. uterine,upper_gi,renal,liver_bileduct
cgagagagttgatggtgcccttcactacttcccaagcatcctagagtcccacgggctgccccgcccacgggcagtggctgcggagtgtctgctctatcaggcatggtgatttcctgccagcctgtgcctttgacattcccaccagaggcagaaccttctgcaggtggccctggccaggctcctctctcctcccagctcctcattagcctcctttgccaggctaggaaaccgaggtatgcgaggttaaggaactttccttgggccgtgcagctgagagtgcgctttgcagggatttgcatccaggccgcgggactcacacaggccacacctgccacccccactgcctctggctcgtgggaggtgtgggatgtggcgggtggccggggcagtgctgggcaggcaggtgttggtattcacaacgttgctttcttgaccgattattttcctgggagacttcctcagtcaaagggttgatatgcttgcgagctctcgatgcacgctatcagattctccaaaaacgtacagccagcttcgcctgcacctgcagcttctgtgatttgtgctcttaattgacgtggcgctttttttaggttgagtcgtttttcattgccaacaatcttctcctgcattgaaataatagctt

SEQ ID NO: 473238 - DNA, 278 bp, Homo sapiens; identical to SEQ ID NO: 349067
  chr21:45400854-45401132
  hypo
  ovary vs. uterine,upper_gi,renal,liver_bileduct

SEQ ID NO: 473239 - DNA, 246 bp, Homo sapiens
  chr21:45790621-45790867
  hypo
  ovary vs. head_and_neck,uterine,pancreas_gallbladder, colorectal,anorectal
cggcggggtcggactggaccagctgttgggctttgtttgctctttttacgaattgaaaaactgaagccaggagcggctgggtgacgtcccaggtcactccttactttcctccccacgctgagctcagacgacttcccgtgacaccactgttggtggcggaatgggactgtggctgcttccgctcagccacgctccctctctgtggacggcggagggtgtgtgtcccagcccggctgccgccctccc

SEQ ID NO: 473240 - DNA, 58 bp, Homo sapiens; identical to SEQ ID NO: 368604
  chr21:45791167-45791225
  hypo
  ovary vs. head_and_neck,uterine,pancreas_gallbladder, colorectal,anorectal

SEQ ID NO: 473241 - DNA, 91 bp, Homo sapiens; identical to SEQ ID NO: 463694
  chr21:46035068-46035159
  hypo

SEQ ID NO: 473242 - DNA, 18 bp, Homo sapiens
  chr21:46035260-46035278
  hypo
gccgcacaggtgccaagc

SEQ ID NO: 473243 - DNA, 410 bp, Homo sapiens; identical to SEQ ID NO: 344596
  chr21:46841015-46841425
  hypo
  ovary vs. myeloid_neoplasm

SEQ ID NO: 473244 - DNA, 539 bp, Homo sapiens; identical to SEQ ID NO: 344631
  chr21:47369859-47370398
  hypo
  ovary vs. thyroid,lymphoid_neoplasm

SEQ ID NO: 473245 - DNA, 426 bp, Homo sapiens; identical to SEQ ID NO: 368703
  chr22:18619428-18619854
  hypo
  ovary vs. upper_gi,pancreas_gallbladder,colorectal, melanoma,renal

SEQ ID NO: 473246 - DNA, 232 bp, Homo sapiens; identical to SEQ ID NO: 344672
  chr22:20050754-20050986
  hypo
  ovary vs. liver_bileduct

SEQ ID NO: 473247 - DNA, 10 bp, Homo sapiens
  chr22:21154023-21154033
  hypo
  ovary vs. renal,sarcoma,lymphoid_neoplasm,melanoma, non_cancer
tgggtccacc

SEQ ID NO: 473248 - DNA, 251 bp, Homo sapiens; identical to SEQ ID NO: 349106
  chr22:27007869-27008120
  hypo
  ovary vs. cervical,melanoma,anorectal,colorectal, head_and_neck,thyroid,breast,renal,bladder_and_urothelial, non_cancer,prostate,pancreas_gallbladder,lung,myeloid_neoplasm, upper_gi,multiple_myeloma,uterine

SEQ ID NO: 473249 - DNA, 89 bp, Homo sapiens
  chr22:27019127-27019216
  hypo
  ovary vs. colorectal,anorectal,cervical
cgagcccccaacctctcacccttcacgggactctgatgcggatctccaccttttttttttcctggcacagatggtggtgtgggatgagg

SEQ ID NO: 473250 - DNA, 112 bp, Homo sapiens; identical to SEQ ID NO: 368779
  chr22:36907702-36907814
  hypo
  ovary vs. liver_bileduct

SEQ ID NO: 473251 - DNA, 176 bp, Homo sapiens; identical to SEQ ID NO: 344820
  chr22:45613836-45614012
  hypo
  ovary vs. liver_bileduct,lung,colorectal,head_and_neck, sarcoma

SEQ ID NO: 473252 - DNA, 154 bp, Homo sapiens; identical to SEQ ID NO: 344823
  chr22:45975280-45975434
  hypo
  ovary vs. cervical,lung

SEQ ID NO: 473253 - DNA, 225 bp, Homo sapiens; identical to SEQ ID NO: 458987
  chr22:46929401-46929626
  hypo
  ovary vs. lymphoid_neoplasm,myeloid_neoplasm

SEQ ID NO: 473254 - DNA, 204 bp, Homo sapiens; identical to SEQ ID NO: 458988
  chr22:46929718-46929922
  hypo
  ovary vs. lymphoid_neoplasm,myeloid_neoplasm

SEQ ID NO: 473255 - DNA, 282 bp, Homo sapiens; identical to SEQ ID NO: 458989
  chr22:46931438-46931720
  hypo
  ovary vs. pancreas_gallbladder,colorectal,upper_gi

SEQ ID NO: 473256 - DNA, 68 bp, Homo sapiens; identical to SEQ ID NO: 349124
  chr22:46932128-46932196
  hypo
  ovary vs. pancreas_gallbladder,colorectal,upper_gi

SEQ ID NO: 473257 - DNA, 135 bp, Homo sapiens; identical to SEQ ID NO: 453912
  chr22:47022417-47022552
  hypo
  ovary vs. liver_bileduct

SEQ ID NO: 473258 - DNA, 413 bp, Homo sapiens; identical to SEQ ID NO: 453913
  chr22:47022632-47023045
  hypo
  ovary vs. liver_bileduct

SEQ ID NO: 473259 - DNA, 58 bp, Homo sapiens; identical to SEQ ID NO: 356575
  chr22:47023191-47023249
  hypo
  ovary vs. liver_bileduct

SEQ ID NO: 473260 - DNA, 99 bp, Homo sapiens; identical to SEQ ID NO: 356579
  chr22:47441200-47441299
  hypo
  ovary vs. head_and_neck,liver_bileduct,lung,melanoma, bladder_and_urothelial,breast

SEQ ID NO: 473261 - DNA, 109 bp, Homo sapiens; identical to SEQ ID NO: 344882
  chr22:50864117-50864226
  hypo
  ovary vs. uterine,sarcoma,lung,cervical,liver_bileduct, bladder_and_urothelial,upper_gi,anorectal,pancreas_gallbladder, head_and_neck,breast,colorectal,lymphoid_neoplasm

SEQ ID NO: 473262 - DNA, 400 bp, Homo sapiens; identical to SEQ ID NO: 338054
  chr3:24160995-24161395
  hypo
  ovary vs. bladder_and_urothelial

SEQ ID NO: 473263 - DNA, 136 bp, Homo sapiens; identical to SEQ ID NO: 363252
  chr3:41289199-41289335
  hypo
  ovary vs. thyroid,cervical

SEQ ID NO: 473264 - DNA, 242 bp, Homo sapiens; identical to SEQ ID NO: 338079
  chr3:42190950-42191192
  hypo
  ovary vs. anorectal,melanoma,liver_bileduct

SEQ ID NO: 473265 - DNA, 81 bp, Homo sapiens; identical to SEQ ID NO: 338091
  chr3:47239328-47239409
  hypo
  ovary vs. liver_bileduct

SEQ ID NO: 473266 - DNA, 25 bp, Homo sapiens
  chr3:48698431-48698456
  hypo
  ovary vs. lung
tgaactgaggagcattgtcgttctc

SEQ ID NO: 473267 - DNA, 118 bp, Homo sapiens; identical to SEQ ID NO: 363263
  chr3:48731393-48731511
  hypo
  ovary vs. lung,pancreas_gallbladder,uterine, bladder_and_urothelial,breast,liver_bileduct,colorectal

SEQ ID NO: 473268 - DNA, 557 bp, Homo sapiens; identical to SEQ ID NO: 347983
  chr3:49720262-49720819
  hypo
  ovary vs. liver_bileduct,lung,upper_gi

SEQ ID NO: 473269 - DNA, 333 bp, Homo sapiens; identical to SEQ ID NO: 455208
  chr3:53032401-53032734
  hypo
  ovary vs. sarcoma,head_and_neck,lymphoid_neoplasm, non_cancer,prostate,breast,renal,thyroid,multiple_myeloma, melanoma,myeloid_neoplasm,anorectal,uterine,lung

SEQ ID NO: 473270 - DNA, 435 bp, Homo sapiens; identical to SEQ ID NO: 338126
  chr3:66452230-66452665
  hypo
  ovary vs. head_and_neck,upper_gi,pancreas_gallbladder, liver_bileduct,lung

SEQ ID NO: 473271 - DNA, 94 bp, Homo sapiens
  chr3:126261836-126261930
  hypo
  ovary vs. uterine,colorectal,sarcoma, bladder_and_urothelial,anorectal,melanoma,pancreas_gallbladder
cgcccaccctggcaaggacagctgcggccaaggacgaaagccctcccttggctggcctcacgatggggccgtcccgggagccaggtgggagctg

SEQ ID NO: 473272 - DNA, 13 bp, Homo sapiens
  chr3:138679565-138679578
  hypo
  ovary vs. myeloid_neoplasm,multiple_myeloma
cgggcacagacgc

SEQ ID NO: 473273 - DNA, 33 bp, Homo sapiens; identical to SEQ ID NO: 338215
  chr3:141664320-141664353
  hypo

SEQ ID NO: 473274 - DNA, 43 bp, Homo sapiens; identical to SEQ ID NO: 338220
  chr3:142683691-142683734
  hypo
  ovary vs. liver_bileduct,bladder_and_urothelial,renal, melanoma,lung,anorectal,lymphoid_neoplasm,sarcoma,colorectal, uterine,prostate,thyroid,upper_gi,pancreas_gallbladder,breast, myeloid_neoplasm,non_cancer

SEQ ID NO: 473275 - DNA, 322 bp, Homo sapiens; identical to SEQ ID NO: 338223
  chr3:143316169-143316491
  hypo
  ovary vs. head_and_neck,uterine,prostate, lymphoid_neoplasm

SEQ ID NO: 473276 - DNA, 54 bp, Homo sapiens; identical to SEQ ID NO: 345815
  chr3:169540679-169540733
  hypo
  ovary vs. sarcoma,renal,melanoma,non_cancer

SEQ ID NO: 473277 - DNA, 217 bp, Homo sapiens; identical to SEQ ID NO: 338261
  chr3:183217407-183217624
  hypo
  ovary vs. pancreas_gallbladder,multiple_myeloma, colorectal,cervical,breast,prostate,melanoma,non_cancer, upper_gi,anorectal,thyroid,uterine,renal,lymphoid_neoplasm, bladder_and_urothelial,sarcoma,lung,liver_bileduct,
  CONT. FROM ABOVE: head_and_neck,myeloid_neoplasm

SEQ ID NO: 473278 - DNA, 334 bp, Homo sapiens; identical to SEQ ID NO: 338292
  chr3:187443068-187443402
  hypo
  ovary vs. liver_bileduct,sarcoma,colorectal,melanoma, pancreas_gallbladder,upper_gi,renal,prostate,cervical

SEQ ID NO: 473279 - DNA, 46 bp, Homo sapiens; identical to SEQ ID NO: 454388
  chr3:187455297-187455343
  hypo
  ovary vs. renal,multiple_myeloma,thyroid,non_cancer, sarcoma,myeloid_neoplasm,colorectal,lymphoid_neoplasm,upper_gi, lung

SEQ ID NO: 473280 - DNA, 447 bp, Homo sapiens; identical to SEQ ID NO: 454389
  chr3:187456666-187457113
  hypo
  ovary vs. multiple_myeloma,non_cancer,thyroid,sarcoma, renal,colorectal,lymphoid_neoplasm,upper_gi,myeloid_neoplasm

SEQ ID NO: 473281 - DNA, 62 bp, Homo sapiens
  chr3:193419641-193419703
  hypo
  ovary vs. uterine,breast,sarcoma,cervical,renal, colorectal,melanoma,anorectal,liver_bileduct,upper_gi, pancreas_gallbladder,multiple_myeloma,thyroid,non_cancer, prostate,bladder_and_urothelial
tttcttatcctgttggtggagtgaggcatttggacctggatgctctccccattgggcgcccc

SEQ ID NO: 473282 - DNA, 275 bp, Homo sapiens; identical to SEQ ID NO: 345825
  chr3:193419732-193420007
  hypo
  ovary vs. uterine,breast,sarcoma,cervical,renal, colorectal,melanoma,anorectal,liver_bileduct,upper_gi, pancreas_gallbladder,multiple_myeloma,thyroid,non_cancer, prostate,bladder_and_urothelial

SEQ ID NO: 473283 - DNA, 324 bp, Homo sapiens; identical to SEQ ID NO: 338308
  chr3:194048948-194049272
  hypo
  ovary vs. myeloid_neoplasm

SEQ ID NO: 473284 - DNA, 363 bp, Homo sapiens; identical to SEQ ID NO: 465589
  chr3:195536308-195536671
  hypo
  ovary vs. uterine,melanoma

SEQ ID NO: 473285 - DNA, 583 bp, Homo sapiens; identical to SEQ ID NO: 472571
  chr3:195599104-195599687
  hypo
  ovary vs. uterine,bladder_and_urothelial,breast,prostate, melanoma,multiple_myeloma,non_cancer,lymphoid_neoplasm, myeloid_neoplasm,cervical,renal

SEQ ID NO: 473286 - DNA, 163 bp, Homo sapiens
  chr3:195599840-195600003
  hypo
  ovary vs. uterine,bladder_and_urothelial,breast,prostate, melanoma,multiple_myeloma,non_cancer,lymphoid_neoplasm, myeloid_neoplasm,cervical,renal
gccttgcactaggctgggggccaggcctccagctacaacctgcctcccgaatgcagacgcgggagagtctaggagcactcgggcaactcagtccctccctccaccgcttcacctgcttccggagctttccaccacctcccggaaggcctgcgggagcctcccc

SEQ ID NO: 473287 - DNA, 174 bp, Homo sapiens; identical to SEQ ID NO: 472572
  chr3:195599513-195599687
  hypo
  ovary vs. uterine,multiple_myeloma,prostate, bladder_and_urothelial,non_cancer,breast,melanoma, liver_bileduct,lymphoid_neoplasm

SEQ ID NO: 473288 - DNA, 247 bp, Homo sapiens
  chr3:195599840-195600087
  hypo
  ovary vs. uterine,multiple_myeloma,prostate, bladder_and_urothelial,non_cancer,breast,melanoma, liver_bileduct,lymphoid_neoplasm
gccttgcactaggctgggggccaggcctccagctacaacctgcctcccgaatgcagacgcgggagagtctaggagcactcgggcaactcagtccctccctccaccgcttcacctgcttccggagctttccaccacctcccggaaggcctgcgggagcctccccgtctcctcaggaggggctctacctgtgtccaaaagggaactcagctctcccacagtgaccagacagtagggctgccagtccccc

SEQ ID NO: 473289 - DNA, 49 bp, Homo sapiens; identical to SEQ ID NO: 345828
  chr3:195601363-195601412
  hypo
  ovary vs. uterine,bladder_and_urothelial,melanoma, prostate,breast,myeloid_neoplasm,non_cancer,cervical, multiple_myeloma,anorectal,head_and_neck,lymphoid_neoplasm,lung

SEQ ID NO: 473290 - DNA, 18 bp, Homo sapiens
  chr3:195834909-195834927
  hypo
  ovary vs. lymphoid_neoplasm
cgcgcctgtcatcttttt

SEQ ID NO: 473291 - DNA, 29 bp, Homo sapiens
  chr3:196387699-196387728
  hypo
  ovary vs. renal
gggctggccagctgcctgggcagcctgcg

SEQ ID NO: 473292 - DNA, 78 bp, Homo sapiens; identical to SEQ ID NO: 363446
  chr3:196387781-196387859
  hypo
  ovary vs. renal

SEQ ID NO: 473293 - DNA, 211 bp, Homo sapiens
  chr3:197685522-197685733
  hypo
  ovary vs. multiple_myeloma
cgggggaaaacaaacggttgagactttaactcgagtaacttacatgtgcaatggcaaatgagactcaaaagcaaatacatgctcttccttactgagatgatgcagcatttgtaaataataaatgtatgtttttatgtttttctcctcccatatggaaattaagtcaaaagtactcaagtcaccgttgccaaaggaggagtcctgtggttta

SEQ ID NO: 473294 - DNA, 32 bp, Homo sapiens; identical to SEQ ID NO: 353437
  chr4:619879-619911
  hypo
  ovary vs. cervical,colorectal,prostate, pancreas_gallbladder,lymphoid_neoplasm,upper_gi,breast

SEQ ID NO: 473295 - DNA, 44 bp, Homo sapiens; identical to SEQ ID NO: 455258
  chr4:628787-628831
  hypo
  ovary vs. anorectal,thyroid,renal

SEQ ID NO: 473296 - DNA, 87 bp, Homo sapiens; identical to SEQ ID NO: 465592
  chr4:628950-629037
  hypo
  ovary vs. anorectal,thyroid,renal

SEQ ID NO: 473297 - DNA, 44 bp, Homo sapiens; identical to SEQ ID NO: 455258
  chr4:628787-628831
  hypo
  ovary vs. anorectal

SEQ ID NO: 473298 - DNA, 421 bp, Homo sapiens; identical to SEQ ID NO: 455259
  chr4:628950-629371
  hypo
  ovary vs. anorectal

SEQ ID NO: 473299 - DNA, 27 bp, Homo sapiens
  chr4:629407-629434
  hypo
  ovary vs. anorectal
tgggctccacgtgctcatctgcacatc

SEQ ID NO: 473300 - DNA, 2 bp, Homo sapiens
  chr4:650837-650839
  hypo
  ovary vs. myeloid_neoplasm,thyroid,non_cancer,prostate, lymphoid_neoplasm,renal
cg

SEQ ID NO: 473301 - DNA, 22 bp, Homo sapiens
  chr4:651348-651370
  hypo
  ovary vs. myeloid_neoplasm,thyroid,non_cancer,prostate, lymphoid_neoplasm,renal
ccaggggtcacccaggggtctc

SEQ ID NO: 473302 - DNA, 161 bp, Homo sapiens
  chr4:738129-738290
  hypo
  ovary vs. uterine,multiple_myeloma,cervical
cgccggctccggctgccccgtctctgtctcctgtgctccccacgcctgcaccccacaggcccacacgcccgttctgcatcctggggagacccctgcagacactttgcggacggctttcctttgacgcttactccgctccgggggtccagagtctcttaatg

SEQ ID NO: 473303 - DNA, 1 bp, Homo sapiens
  chr4:830008-830009
  hypo
  ovary vs. head_and_neck
c

SEQ ID NO: 473304 - DNA, 12 bp, Homo sapiens
  chr4:1008729-1008741
  hypo
  ovary vs. renal,thyroid,prostate,liver_bileduct,lung, bladder_and_urothelial,colorectal,cervical,pancreas_gallbladder, lymphoid_neoplasm,anorectal
ccattgtgcggg

SEQ ID NO: 473305 - DNA, 25 bp, Homo sapiens
  chr4:1008902-1008927
  hypo
  ovary vs. renal,thyroid,prostate,liver_bileduct,lung, bladder_and_urothelial,colorectal,cervical,pancreas_gallbladder, lymphoid_neoplasm,anorectal
gggctgtgcccgcagactggacccc

SEQ ID NO: 473306 - DNA, 69 bp, Homo sapiens; identical to SEQ ID NO: 349899
  chr4:1036539-1036608
  hypo
  ovary vs. prostate,thyroid,breast,uterine,non_cancer, renal,lymphoid_neoplasm

SEQ ID NO: 473307 - DNA, 74 bp, Homo sapiens
  chr4:1214821-1214895
  hypo
  ovary vs. sarcoma,lung,upper_gi,breast,liver_bileduct, pancreas_gallbladder,renal,colorectal,bladder_and_urothelial, melanoma,prostate,head_and_neck,cervical,myeloid_neoplasm
cggcctgagatattcgtaaacaagaaaaaacaaaaattttgaaattatgaaaatatccacaatgcatgtcgatc

SEQ ID NO: 473308 - DNA, 254 bp, Homo sapiens
  chr4:1215162-1215416
  hypo
  ovary vs. lung,liver_bileduct,upper_gi, pancreas_gallbladder,multiple_myeloma,breast,colorectal,sarcoma, renal,uterine,melanoma,bladder_and_urothelial
ctctgggactcagaaattccactcctaggtacaaacccaagagacgtgagtctatgtgcacaaaaaagacgggcagaaatgtgttcacacaagttttgtttgtaatattagccaaaaacttacaaaatgcatcaccaagagtctggagaagcaaatcgtgctgtgttcacgtgatggaaccgttatcagaaactgctgggtcgtatgaaaacacaggtgagacccagaggcatcaccccgactgacgggaggcg

SEQ ID NO: 473309 - DNA, 73 bp, Homo sapiens; identical to SEQ ID NO: 353449
  chr4:1215451-1215524
  hypo
  ovary vs. lung,liver_bileduct,upper_gi, pancreas_gallbladder,multiple_myeloma,breast,colorectal,sarcoma, renal,uterine,melanoma,bladder_and_urothelial

SEQ ID NO: 473310 - DNA, 71 bp, Homo sapiens; identical to SEQ ID NO: 472176
  chr4:1282403-1282474
  hypo
  ovary vs. bladder_and_urothelial

SEQ ID NO: 473311 - DNA, 136 bp, Homo sapiens; identical to SEQ ID NO: 345830
  chr4:1336902-1337038
  hypo
  ovary vs. bladder_and_urothelial,cervical, pancreas_gallbladder,anorectal,head_and_neck,prostate, multiple_myeloma,breast,myeloid_neoplasm,lung,thyroid, lymphoid_neoplasm,non_cancer,sarcoma,upper_gi,colorectal,renal,
  CONT. FROM ABOVE: liver_bileduct

SEQ ID NO: 473312 - DNA, 11 bp, Homo sapiens
  chr4:1512231-1512242
  hypo
  ovary vs. lymphoid_neoplasm,thyroid
cgactttactc

SEQ ID NO: 473313 - DNA, 276 bp, Homo sapiens; identical to SEQ ID NO: 338380
  chr4:1541591-1541867
  hypo
  ovary vs. pancreas_gallbladder

SEQ ID NO: 473314 - DNA, 57 bp, Homo sapiens; identical to SEQ ID NO: 456997
  chr4:1993659-1993716
  hypo
  ovary vs. lymphoid_neoplasm,thyroid,sarcoma,prostate, multiple_myeloma,myeloid_neoplasm,non_cancer, bladder_and_urothelial

SEQ ID NO: 473315 - DNA, 197 bp, Homo sapiens; identical to SEQ ID NO: 348041
  chr4:1994335-1994532
  hypo
  ovary vs. lymphoid_neoplasm,thyroid,sarcoma,prostate, multiple_myeloma,myeloid_neoplasm,non_cancer, bladder_and_urothelial

SEQ ID NO: 473316 - DNA, 411 bp, Homo sapiens
  chr4:1994335-1994746
  hypo
  ovary vs. prostate,myeloid_neoplasm,sarcoma, lymphoid_neoplasm,thyroid,non_cancer,multiple_myeloma
agccccaggccttcctgacacccactccctgcgtcaggcgccagagacccgtcctacgagggctgcggccatcacgtccccgcgagcgccgcctcctggtggcctctgagtgggaggaccttccagcgcttccctcactgtcctcatgggcttcctgccctgagggaagttggctcgaagggcagagatcagaggtcgtgccaggggagcctgcctgctgccaagcccctctgcatctgccctgcaggacacccagctgccctcaggagtcaagaaccccccgcgtggcccagccccttctgttccttgggcaaccagggagggtgtcgccccggccgctgaccctgcgccccgggccctcactcccgacgcccgcccgagctgagtgcgcgatgcggcagaagatgctac

SEQ ID NO: 473317 - DNA, 206 bp, Homo sapiens; identical to SEQ ID NO: 353464
  chr4:1994830-1995036
  hypo
  ovary vs. prostate,myeloid_neoplasm,sarcoma, lymphoid_neoplasm,thyroid,non_cancer,multiple_myeloma

SEQ ID NO: 473318 - DNA, 81 bp, Homo sapiens; identical to SEQ ID NO: 338410
  chr4:2672891-2672972
  hypo
  ovary vs. head_and_neck,cervical,bladder_and_urothelial, colorectal

SEQ ID NO: 473319 - DNA, 242 bp, Homo sapiens; identical to SEQ ID NO: 338418
  chr4:3245192-3245434
  hypo
  ovary vs. upper_gi,bladder_and_urothelial,breast, melanoma,uterine,colorectal,liver_bileduct

SEQ ID NO: 473320 - DNA, 527 bp, Homo sapiens
  chr4:3252217-3252744
  hypo
  ovary vs. cervical,melanoma,colorectal,uterine, head_and_neck,breast,upper_gi,prostate
cggtgagggtcttgcagggtgtgaaggtcataggtgtgcggtgaaggtcacaggtgtggggtgatggttttgggtgtggggagggtcttgcacggagcgagggtggcagcaagagctggaagctgcagggggagaatggcagcagagagcacccggccctgtgggcggcctggacagggctgggcctggggctgccggagagcctgtcagcttccaggatgggagtggcctcactcagctgctccacctccgggtcaggcaggtgagcctggggcagagaggctgagagcacctgagccacttgtgggagaggccacccccactgcccccctcaggcgaggagccggcctccagcacagcagaagggaacccccagtccccagccctagtgggagtggggaagaggcccagcaaggccccggacagaccgccagcctgtgaggtctccgctttcagttgcgttgatttgattttttctgagccttgaaggaggggtccggggcctggccctgcccaaaggcccctag

SEQ ID NO: 473321 - DNA, 201 bp, Homo sapiens; identical to SEQ ID NO: 353475
  chr4:3252797-3252998
  hypo
  ovary vs. cervical,melanoma,colorectal,uterine, head_and_neck,breast,upper_gi,prostate

SEQ ID NO: 473322 - DNA, 23 bp, Homo sapiens
  chr4:6748324-6748347
  hypo
  ovary vs. renal,lymphoid_neoplasm,thyroid,non_cancer, melanoma,bladder_and_urothelial,cervical,uterine,sarcoma, prostate,liver_bileduct,myeloid_neoplasm,upper_gi
cgtccaccggcaaaggacaatgg

SEQ ID NO: 473323 - DNA, 298 bp, Homo sapiens; identical to SEQ ID NO: 338446
  chr4:8372577-8372875
  hypo
  ovary vs. bladder_and_urothelial

SEQ ID NO: 473324 - DNA, 108 bp, Homo sapiens; identical to SEQ ID NO: 338466
  chr4:24534559-24534667
  hypo
  ovary vs. liver_bileduct,pancreas_gallbladder,colorectal

SEQ ID NO: 473325 - DNA, 65 bp, Homo sapiens
  chr4:25013897-25013962
  hypo
  ovary vs. lung,colorectal,breast,pancreas_gallbladder, head_and_neck,sarcoma,lymphoid_neoplasm,upper_gi,anorectal, melanoma,prostate,renal
cgcgggcttgccgcaatgctgaaattagttcaacacatctgatcaaagccacaacacacctgtaa

SEQ ID NO: 473326 - DNA, 22 bp, Homo sapiens
  chr4:25014050-25014072
  hypo
  ovary vs. lung,colorectal,breast,pancreas_gallbladder, head_and_neck,sarcoma,lymphoid_neoplasm,upper_gi,anorectal, melanoma,prostate,renal
cacatcgttcttggagttgaac

SEQ ID NO: 473327 - DNA, 174 bp, Homo sapiens
  chr4:57777264-57777438
  hypo
  ovary vs. cervical,anorectal,head_and_neck
cgaagaccaaaccctttcgctgtaagccatgccaatatgaagcagaatctgaagaacagtttgtgcatcacatcagagttcacagtgctaagaaattttttgtggaagagagtgcagagaagcaggcaaaagccagggaatctggctcttccactgcagaagagggagatttct

SEQ ID NO: 473328 - DNA, 706 bp, Homo sapiens
  chr4:100573606-100574312
  hypo
  ovary vs. colorectal,upper_gi,breast, bladder_and_urothelial,thyroid,liver_bileduct,non_cancer, sarcoma,cervical,prostate,lung,anorectal,melanoma, pancreas_gallbladder,renal,myeloid_neoplasm
cgtctccacatgtttgatttccccctcgactttgctgaccacgaactccaaggccttggtctgagacttcttggactggatgtagagctggtcggcagtggcccgggccccactgcccttcctcagacctgcagccacagaggccgcgctgctcctgaggaggctctgctccaccctggccccaacacccccacattttaagtccaggaaagttgaccagcgcccaaagcccacttcggagagcgtggtggaggactcccgggagctgatgttcagagcctcaaagtaggggtaagccaggctccggaaggcccgggaggtcaggttacgcacctctttgtccgcatcgtccagttcgctcacggcactggaggctccgctggagtagtccaccagctccttcgcccggatggccccgcacctggtttgcaggcgagcaggtacagcaatgaatttctttgcatggtcctgagccactgctgcagccgggttttgcttcagcgaacttgaattgtgttcagcagctgtagagacgcggaggctcatgtcgccttcatgcttggcagcataaataatgttttgctttgcacgcacgttgctaggctcatttatagcccgggaagccggtttgattgataggaggatctggcttgctgcactcccacagctgcttgcggcggcggctgctgcccctgaagctgcctcc

SEQ ID NO: 473329 - DNA, 758 bp, Homo sapiens
  chr4:100573865-100574623
  hypo
  ovary vs. breast,colorectal,bladder_and_urothelial, liver_bileduct,upper_gi,anorectal,non_cancer,prostate, pancreas_gallbladder,melanoma,thyroid,cervical,lung, myeloid_neoplasm,sarcoma,renal
cgggagctgatgttcagagcctcaaagtaggggtaagccaggctccggaaggcccgggaggtcaggttacgcacctctttgtccgcatcgtccagttcgctcacggcactggaggctccgctggagtagtccaccagctccttcgcccggatggccccgcacctggtttgcaggcgagcaggtacagcaatgaatttctttgcatggtcctgagccactgctgcagccgggttttgcttcagcgaacttgaattgtgttcagcagctgtagagacgcggaggctcatgtcgccttcatgcttggcagcataaataatgttttgctttgcacgcacgttgctaggctcatttatagcccgggaagccggtttgattgataggaggatctggcttgctgcactcccacagctgcttgcggcggcggctgctgcccctgaagctgcctccggggtctcaggcaagggctcagtcaggggggcagtgccaggcccagtgggtgggggagtggggccactgtcagaggggccactgcccacttcggtgctgctggtgtcgcggccactgcggcctgcattggggcgggccaggtcgctgcttgtagggctgggcgtccgggtggtgttggtgctgggagtggtgctgaggtagcagctgttgtcgtcgtcctcttcggtcagactggtgatgtcccctggggtctcgtcgctgccaccaaaggaagcataatccacgaacgagtagatcacgttgttgtcctc

SEQ ID NO: 473330 - DNA, 168 bp, Homo sapiens; identical to SEQ ID NO: 338523
  chr4:103421142-103421310
  hypo
  ovary vs. anorectal,upper_gi,lung,bladder_and_urothelial, pancreas_gallbladder,melanoma

SEQ ID NO: 473331 - DNA, 132 bp, Homo sapiens; identical to SEQ ID NO: 338567
  chr4:183808118-183808250
  hypo
  ovary vs. pancreas_gallbladder,lung,sarcoma

SEQ ID NO: 473332 - DNA, 352 bp, Homo sapiens
  chr5:488144-488496
  hypo
  ovary vs. pancreas_gallbladder
cgctctggggaccaggagggcgggatttcaacagcgccatcattaaccctgaagctatggagtgggcgggcagggcctgggaactgtggaagatacaaagaagcctcgcgaaagctgccagtcgttctgagctgggaggaaggaggtggagggacgggacgcccccgggaggggagtttgaggacagggtttcacgccctcctttgctgactgaccgatggggggtgagacggggcccaggcctcccacggctcgcccgctctggagcggtggctccgttgctcaccacggtgactgcgtcgttcagcagcgactccccgaagacgatgatgaacaggacctcgttgacatg

SEQ ID NO: 473333 - DNA, 52 bp, Homo sapiens; identical to SEQ ID NO: 363654
  chr5:488553-488605
  hypo
  ovary vs. pancreas_gallbladder

SEQ ID NO: 473334 - DNA, 386 bp, Homo sapiens; identical to SEQ ID NO: 363656
  chr5:510026-510412
  hypo
  ovary vs. colorectal,upper_gi

SEQ ID NO: 473335 - DNA, 61 bp, Homo sapiens
  chr5:554571-554632
  hypo
  ovary vs. myeloid_neoplasm
tgacccgggggtgggtcacgggataaaccaggggtggggggctgggtcacgggatgaacgg

SEQ ID NO: 473336 - DNA, 61 bp, Homo sapiens
  chr5:554751-554812
  hypo
  ovary vs. myeloid_neoplasm
gatgaacggggggcgggtcacaggatgaaccgtgggtgggtcatgggataaaccagggtgg

SEQ ID NO: 473337 - DNA, 140 bp, Homo sapiens; identical to SEQ ID NO: 363660
  chr5:554931-555071
  hypo
  ovary vs. myeloid_neoplasm

SEQ ID NO: 473338 - DNA, 161 bp, Homo sapiens
  chr5:600977-601138
  hypo
  ovary vs. melanoma,head_and_neck,sarcoma, lymphoid_neoplasm,uterine,thyroid,cervical
cgcccaccatggcgttagggccacagcctcctgccccatgtgccaggcccggctctgcccagctccctgcagctgcgccagtgtgtgctgtgactcgtgctcctggtttgtcatctgcctctcagtagacaccacggccttcaagctttctccgctccgtg

SEQ ID NO: 473339 - DNA, 263 bp, Homo sapiens; identical to SEQ ID NO: 353539
  chr5:601222-601485
  hypo
  ovary vs. melanoma,head_and_neck,sarcoma, lymphoid_neoplasm,uterine,thyroid,cervical

SEQ ID NO: 473340 - DNA, 373 bp, Homo sapiens; identical to SEQ ID NO: 338656
  chr5:1476334-1476707
  hypo
  ovary vs. pancreas_gallbladder,sarcoma,colorectal

SEQ ID NO: 473341 - DNA, 131 bp, Homo sapiens; identical to SEQ ID NO: 363712
  chr5:1641261-1641392
  hypo

SEQ ID NO: 473342 - DNA, 42 bp, Homo sapiens; identical to SEQ ID NO: 455291
  chr5:1729774-1729816
  hypo
  ovary vs. head_and_neck,anorectal

SEQ ID NO: 473343 - DNA, 331 bp, Homo sapiens; identical to SEQ ID NO: 455292
  chr5:1729886-1730217
  hypo
  ovary vs. head_and_neck,anorectal

SEQ ID NO: 473344 - DNA, 56 bp, Homo sapiens; identical to SEQ ID NO: 363716
  chr5:1730252-1730308
  hypo
  ovary vs. head_and_neck,anorectal

SEQ ID NO: 473345 - DNA, 52 bp, Homo sapiens; identical to SEQ ID NO: 465643
  chr5:3324702-3324754
  hypo
  ovary vs. anorectal,non_cancer,thyroid,lymphoid_neoplasm, renal,prostate,sarcoma,bladder_and_urothelial,liver_bileduct, uterine

SEQ ID NO: 473346 - DNA, 283 bp, Homo sapiens; identical to SEQ ID NO: 348078
  chr5:3325333-3325616
  hypo
  ovary vs. anorectal,non_cancer,thyroid,lymphoid_neoplasm, renal,prostate,sarcoma,bladder_and_urothelial,liver_bileduct, uterine

SEQ ID NO: 473347 - DNA, 114 bp, Homo sapiens; identical to SEQ ID NO: 463790
  chr5:3740590-3740704
  hypo
  ovary vs. uterine,cervical,thyroid,lymphoid_neoplasm

SEQ ID NO: 473348 - DNA, 22 bp, Homo sapiens
  chr5:3741017-3741039
  hypo
  ovary vs. uterine,cervical,thyroid,lymphoid_neoplasm
gacccaccccagcgtgcctacc

SEQ ID NO: 473349 - DNA, 453 bp, Homo sapiens; identical to SEQ ID NO: 338705
  chr5:14328256-14328709
  hypo
  ovary vs. liver_bileduct,upper_gi

SEQ ID NO: 473350 - DNA, 119 bp, Homo sapiens
  chr5:27523835-27523954
  hypo
  ovary vs. sarcoma
cgcacctgctgaggatgagcccctcgaggagcggcgcggggtgtgtgggagaacaatcacgggctccggccaccgtgcacagccacgcacaccggctagcacagtggggagggcagctc

SEQ ID NO: 473351 - DNA, 8 bp, Homo sapiens
  chr5:27524015-27524023
  hypo
  ovary vs. sarcoma
cggcttcc

SEQ ID NO: 473352 - DNA, 15 bp, Homo sapiens
  chr5:79911142-79911157
  hypo
  ovary vs. colorectal,lymphoid_neoplasm,renal
cgcggggctacagag

SEQ ID NO: 473353 - DNA, 240 bp, Homo sapiens; identical to SEQ ID NO: 363789
  chr5:79911325-79911565
  hypo
  ovary vs. colorectal,lymphoid_neoplasm,renal

SEQ ID NO: 473354 - DNA, 132 bp, Homo sapiens; identical to SEQ ID NO: 338767
  chr5:96121466-96121598
  hypo
  ovary vs. upper_gi,breast,lymphoid_neoplasm, liver_bileduct,multiple_myeloma,colorectal,pancreas_gallbladder, bladder_and_urothelial,non_cancer,melanoma,head_and_neck,renal, prostate,myeloid_neoplasm,cervical,sarcoma

SEQ ID NO: 473355 - DNA, 45 bp, Homo sapiens; identical to SEQ ID NO: 457028
  chr5:98200950-98200995
  hypo
  ovary vs. liver_bileduct,sarcoma,cervical,head_and_neck, lymphoid_neoplasm,anorectal,multiple_myeloma,melanoma

SEQ ID NO: 473356 - DNA, 252 bp, Homo sapiens; identical to SEQ ID NO: 338792
  chr5:132607933-132608185
  hypo
  ovary vs. colorectal

SEQ ID NO: 473357 - DNA, 625 bp, Homo sapiens; identical to SEQ ID NO: 456042
  chr5:142781875-142782500
  hypo
  ovary vs. multiple_myeloma

SEQ ID NO: 473358 - DNA, 78 bp, Homo sapiens; identical to SEQ ID NO: 456043
  chr5:142782625-142782703
  hypo
  ovary vs. multiple_myeloma

SEQ ID NO: 473359 - DNA, 135 bp, Homo sapiens; identical to SEQ ID NO: 338834
  chr5:158139227-158139362
  hypo
  ovary vs. uterine,head_and_neck,sarcoma, pancreas_gallbladder,melanoma,anorectal,lymphoid_neoplasm, breast,colorectal,renal,non_cancer,prostate

SEQ ID NO: 473360 - DNA, 293 bp, Homo sapiens; identical to SEQ ID NO: 338853
  chr5:171478667-171478960
  hypo
  ovary vs. lung

SEQ ID NO: 473361 - DNA, 266 bp, Homo sapiens; identical to SEQ ID NO: 363875
  chr5:171523258-171523524
  hypo
  ovary vs. bladder_and_urothelial,upper_gi,lung,cervical, head_and_neck,uterine

SEQ ID NO: 473362 - DNA, 174 bp, Homo sapiens
  chr5:171533446-171533620
  hypo
  ovary vs. uterine,cervical,melanoma,anorectal, myeloid_neoplasm,colorectal,breast,head_and_neck, pancreas_gallbladder,lymphoid_neoplasm,bladder_and_urothelial, renal,prostate,upper_gi,non_cancer,thyroid,multiple_myeloma
cgaagggcccgggggggctcagaaacgcctgaagacccccaggccccaacctctcctttggagctagcagcaccaggagaacgctaccactgcacctccccagccccgtccaccacatattccagccctaatcccggcgcaggcaccccggcaggtggccctgcccctgcccct

SEQ ID NO: 473363 - DNA, 259 bp, Homo sapiens
  chr5:172353785-172354044
  hypo
  ovary vs. liver_bileduct,melanoma,breast,uterine,sarcoma, anorectal,head_and_neck,cervical,thyroid,lung,lymphoid_neoplasm, prostate
cggggcacagcagacgcacgcacgcagtggataccagctattaccattattgttgctctcatcacagccacatcatcatccttagttgaactaattacctaagatcccacagggagctatggcagaaccaggatctgttctgcctccaggtcgcaccgtgagaacaggtctgtgggtggcccagtcagctgtgaccacatggctgcctcccccacacctcactctcctcctgctcagactcctcccatcgatagtggct

SEQ ID NO: 473364 - DNA, 84 bp, Homo sapiens; identical to SEQ ID NO: 348117
  chr5:172354118-172354202
  hypo
  ovary vs. liver_bileduct,melanoma,breast,uterine,sarcoma, anorectal,head_and_neck,cervical,thyroid,lung,lymphoid_neoplasm, prostate

SEQ ID NO: 473365 - DNA, 114 bp, Homo sapiens
  chr5:176225713-176225827
  hypo
  ovary vs. head_and_neck,anorectal,pancreas_gallbladder
cggggagccgcgcggggcaggagccaggcccacagacagcaagcagcgttctgcttggctgatccacgatgtcggggctgcggcatctccgcttccgcccggagagtgacggcg

SEQ ID NO: 473366 - DNA, 3 bp, Homo sapiens
  chr5:178987428-178987431
  hypo
  ovary vs. head_and_neck,multiple_myeloma
cgt

SEQ ID NO: 473367 - DNA, 306 bp, Homo sapiens; identical to SEQ ID NO: 377597
  chr6:1523653-1523959
  hypo
  ovary vs. pancreas_gallbladder,upper_gi

SEQ ID NO: 473368 - DNA, 176 bp, Homo sapiens
  chr6:1708438-1708614
  hypo
  ovary vs. colorectal,upper_gi
cgtgaaacaaaatgcggcatctgggtatatctcaaaggtagggaaggaaacaactcgaaggctgtaactttcccgacacttgagacgtcactcctttgcaaggcagcattcccagcaggcagcgaagcgtgtttggagaagctggagggcagatgaggagtggagggaaggcgggt

SEQ ID NO: 473369 - DNA, 96 bp, Homo sapiens; identical to SEQ ID NO: 363945
  chr6:1708643-1708739
  hypo
  ovary vs. colorectal,upper_gi

SEQ ID NO: 473370 - DNA, 551 bp, Homo sapiens; identical to SEQ ID NO: 338935
  chr6:2434643-2435194
  hypo
  ovary vs. colorectal

SEQ ID NO: 473371 - DNA, 22 bp, Homo sapiens
  chr6:3065529-3065551
  hypo
  ovary vs. uterine
cggctttctgaggtgccgtgcg

SEQ ID NO: 473372 - DNA, 14 bp, Homo sapiens
  chr6:3065634-3065648
  hypo
  ovary vs. uterine
agatgaggtgtccc

SEQ ID NO: 473373 - DNA, 266 bp, Homo sapiens; identical to SEQ ID NO: 345875
  chr6:3285535-3285801
  hypo
  ovary vs. colorectal,myeloid_neoplasm,upper_gi,renal, non_cancer,thyroid,liver_bileduct,prostate, bladder_and_urothelial,cervical,pancreas_gallbladder, multiple_myeloma,melanoma,lymphoid_neoplasm,sarcoma,
  CONT. FROM ABOVE: head_and_neck,anorectal,lung, uterine,breast

SEQ ID NO: 473374 - DNA, 114 bp, Homo sapiens; identical to SEQ ID NO: 338947
  chr6:3654816-3654930
  hypo
  ovary vs. sarcoma,lung,head_and_neck

SEQ ID NO: 473375 - DNA, 133 bp, Homo sapiens; identical to SEQ ID NO: 363973
  chr6:7204388-7204521
  hypo
  ovary vs. liver_bileduct,sarcoma,breast,multiple_myeloma, colorectal,melanoma,upper_gi

SEQ ID NO: 473376 - DNA, 124 bp, Homo sapiens
  chr6:7920003-7920127
  hypo
  ovary vs. lymphoid_neoplasm,multiple_myeloma,anorectal, renal,breast,prostate,lung,non_cancer,uterine,head_and_neck
cgaatgaataagaaggcagtacagaatgagaacactggcttttacgaatgagaagggaagtcatcggagggttttcagaagaaacacgacaggatctggcttccaattatttctacagcatggc

SEQ ID NO: 473377 - DNA, 21 bp, Homo sapiens
  chr6:7920165-7920186
  hypo
  ovary vs. lymphoid_neoplasm,multiple_myeloma,anorectal, renal,breast,prostate,lung,non_cancer,uterine,head_and_neck
tagaagggaggcgaccactcc

SEQ ID NO: 473378 - DNA, 395 bp, Homo sapiens
  chr6:15513386-15513781
  hypo
  ovary vs. uterine,lung,head_and_neck,upper_gi,breast, colorectal,cervical,melanoma,pancreas_gallbladder,renal, liver_bileduct,bladder_and_urothelial,anorectal,prostate, lymphoid_neoplasm,multiple_myeloma,myeloid_neoplasm,thyroid,
  CONT. FROM ABOVE: sarcoma,non_cancer
cggtgtggggtgcgtgtgtcccctctgctggtgagcatggcaggccgtcactaaaggtgcgggccgtctcccgtgtctggcagggatacagagctgcggcagcgcaggcagctgttcgaggctggcctccactcctccgcacgctatggcagccacgatggcagcagcacggtggcggacgggaagaaaaagcctcgaaagtggctgcagttggagacgtcagagaggaggtgtcagatctgccagcacctgtgctacctgtccatggtgagcccgcctggccctgccggcgccctcgcatgtagtgcttggcctgagagctccggggttgcccccagaagagggagggcgctctctgcccaggagacctgctgtgctcccatctctggagccgg

SEQ ID NO: 473379 - DNA, 48 bp, Homo sapiens; identical to SEQ ID NO: 345880
  chr6:15513981-15514029
  hypo
  ovary vs. uterine,lung,head_and_neck,upper_gi,breast, colorectal,cervical,melanoma,pancreas_gallbladder,renal, liver_bileduct,bladder_and_urothelial,anorectal,prostate, lymphoid_neoplasm,multiple_myeloma,myeloid_neoplasm,thyroid,
  CONT. FROM ABOVE: sarcoma,non_cancer

SEQ ID NO: 473380 - DNA, 104 bp, Homo sapiens; identical to SEQ ID NO: 339007
  chr6:27428748-27428852
  hypo
  ovary vs. head_and_neck,lung

SEQ ID NO: 473381 - DNA, 314 bp, Homo sapiens; identical to SEQ ID NO: 455328
  chr6:37023826-37024140
  hypo
  ovary vs. sarcoma,melanoma,renal,non_cancer, myeloid_neoplasm,prostate

SEQ ID NO: 473382 - DNA, 70 bp, Homo sapiens; identical to SEQ ID NO: 339031
  chr6:37450290-37450360
  hypo
  ovary vs. upper_gi,liver_bileduct,head_and_neck, pancreas_gallbladder,breast,sarcoma

SEQ ID NO: 473383 - DNA, 116 bp, Homo sapiens; identical to SEQ ID NO: 339063
  chr6:44077041-44077157
  hypo
  ovary vs. lung,liver_bileduct,head_and_neck,uterine, bladder_and_urothelial,upper_gi,colorectal

SEQ ID NO: 473384 - DNA, 142 bp, Homo sapiens; identical to SEQ ID NO: 339108
  chr6:106456830-106456972
  hypo
  ovary vs. bladder_and_urothelial,lung,head_and_neck, upper_gi,uterine,sarcoma

SEQ ID NO: 473385 - DNA, 155 bp, Homo sapiens; identical to SEQ ID NO: 345249
  chr6:106961023-106961178
  hypo
  ovary vs. myeloid_neoplasm,thyroid,non_cancer, head_and_neck,pancreas_gallbladder,lymphoid_neoplasm,prostate, renal,cervical,colorectal,upper_gi,anorectal,liver_bileduct, sarcoma

SEQ ID NO: 473386 - DNA, 85 bp, Homo sapiens; identical to SEQ ID NO: 339113
  chr6:109053387-109053472
  hypo
  ovary vs. renal,prostate,breast,sarcoma,liver_bileduct, cervical,melanoma,non_cancer

SEQ ID NO: 473387 - DNA, 93 bp, Homo sapiens; identical to SEQ ID NO: 339118
  chr6:110842285-110842378
  hypo
  ovary vs. sarcoma,lung,breast,bladder_and_urothelial, cervical,thyroid,pancreas_gallbladder,upper_gi,renal,prostate, non_cancer

SEQ ID NO: 473388 - DNA, 62 bp, Homo sapiens; identical to SEQ ID NO: 339167
  chr6:158057907-158057969
  hypo
  ovary vs. bladder_and_urothelial,melanoma

SEQ ID NO: 473389 - DNA, 85 bp, Homo sapiens
  chr6:167836474-167836559
  hypo
  ovary vs. liver_bileduct
cggctccctcatacactgcggcttcccccccaacacatgacggctcacccacatctggcggctccccctctacacggctcccgtc

SEQ ID NO: 473390 - DNA, 305 bp, Homo sapiens; identical to SEQ ID NO: 377854
  chr6:167836629-167836934
  hypo
  ovary vs. liver_bileduct

SEQ ID NO: 473391 - DNA, 644 bp, Homo sapiens; identical to SEQ ID NO: 339202
  chr6:168378621-168379265
  hypo
  ovary vs. lung,bladder_and_urothelial,liver_bileduct, pancreas_gallbladder,head_and_neck

SEQ ID NO: 473392 - DNA, 46 bp, Homo sapiens
  chr7:345250-345296
  hypo
cgctgtttgtacagagaaaggggtgcacagagccgtggacctgcag

SEQ ID NO: 473393 - DNA, 147 bp, Homo sapiens; identical to SEQ ID NO: 353872
  chr7:345608-345755
  hypo

SEQ ID NO: 473394 - DNA, 594 bp, Homo sapiens; identical to SEQ ID NO: 339268
  chr7:943355-943949
  hypo
  ovary vs. uterine,upper_gi,pancreas_gallbladder, anorectal,colorectal,sarcoma,renal,thyroid,prostate,breast, cervical

SEQ ID NO: 473395 - DNA, 333 bp, Homo sapiens; identical to SEQ ID NO: 332995
  chr7:1001822-1002155
  hypo
  ovary vs. colorectal,lung,breast,cervical,upper_gi, pancreas_gallbladder,prostate,head_and_neck,melanoma,anorectal, liver_bileduct

SEQ ID NO: 473396 - DNA, 140 bp, Homo sapiens; identical to SEQ ID NO: 455367
  chr7:1315705-1315845
  hypo
  ovary vs. head_and_neck,pancreas_gallbladder,anorectal, cervical,colorectal,lymphoid_neoplasm,renal,thyroid,non_cancer, breast,lung,prostate,upper_gi

SEQ ID NO: 473397 - DNA, 532 bp, Homo sapiens; identical to SEQ ID NO: 339294
  chr7:1533923-1534455
  hypo
  ovary vs. lung,head_and_neck,liver_bileduct, pancreas_gallbladder,uterine,bladder_and_urothelial,breast, multiple_myeloma,renal

SEQ ID NO: 473398 - DNA, 36 bp, Homo sapiens; identical to SEQ ID NO: 465695
  chr7:1733131-1733167
  hypo
  ovary vs. melanoma,anorectal

SEQ ID NO: 473399 - DNA, 13 bp, Homo sapiens
  chr7:1735052-1735065
  hypo
  ovary vs. sarcoma,lymphoid_neoplasm
gcagactcagccc

SEQ ID NO: 473400 - DNA, 324 bp, Homo sapiens; identical to SEQ ID NO: 377984
  chr7:2019121-2019445
  hypo
  ovary vs. upper_gi,bladder_and_urothelial

SEQ ID NO: 473401 - DNA, 109 bp, Homo sapiens
  chr7:2024704-2024813
  hypo
  ovary vs. uterine,liver_bileduct,head_and_neck,anorectal, melanoma,lung,cervical,bladder_and_urothelial, pancreas_gallbladder,upper_gi,breast,renal
cggttcattccatgtgtccactggacaggacctggggtactcagatcaaaacactttctgggtgtgtctgggagggtttgtggatgagatcagcatttgaatcggggac

SEQ ID NO: 473402 - DNA, 384 bp, Homo sapiens; identical to SEQ ID NO: 353898
  chr7:2024842-2025226
  hypo
  ovary vs. uterine,liver_bileduct,head_and_neck,anorectal, melanoma,lung,cervical,bladder_and_urothelial, pancreas_gallbladder,upper_gi,breast,renal

SEQ ID NO: 473403 - DNA, 147 bp, Homo sapiens; identical to SEQ ID NO: 339320
  chr7:2068947-2069094
  hypo
  ovary vs. sarcoma,lung

SEQ ID NO: 473404 - DNA, 109 bp, Homo sapiens; identical to SEQ ID NO: 339321
  chr7:2069789-2069898
  hypo
  ovary vs. lung,head_and_neck,sarcoma, pancreas_gallbladder

SEQ ID NO: 473405 - DNA, 142 bp, Homo sapiens; identical to SEQ ID NO: 339322
  chr7:2070150-2070292
  hypo
  ovary vs. liver_bileduct

SEQ ID NO: 473406 - DNA, 253 bp, Homo sapiens; identical to SEQ ID NO: 348189
  chr7:2071776-2072029
  hypo
  ovary vs. upper_gi,head_and_neck,melanoma,lung, pancreas_gallbladder,liver_bileduct,colorectal, bladder_and_urothelial

SEQ ID NO: 473407 - DNA, 309 bp, Homo sapiens; identical to SEQ ID NO: 339324
  chr7:2102525-2102834
  hypo
  ovary vs. lung,bladder_and_urothelial,breast

SEQ ID NO: 473408 - DNA, 327 bp, Homo sapiens; identical to SEQ ID NO: 454005
  chr7:2208344-2208671
  hypo
  ovary vs. melanoma,liver_bileduct,cervical,colorectal, non_cancer,pancreas_gallbladder,myeloid_neoplasm,sarcoma, upper_gi,thyroid,uterine,breast

SEQ ID NO: 473409 - DNA, 91 bp, Homo sapiens; identical to SEQ ID NO: 345892
  chr7:2208844-2208935
  hypo
  ovary vs. melanoma,liver_bileduct,cervical,colorectal, non_cancer,pancreas_gallbladder,myeloid_neoplasm,sarcoma, upper_gi,thyroid,uterine,breast

SEQ ID NO: 473410 - DNA, 199 bp, Homo sapiens; identical to SEQ ID NO: 339330
  chr7:2222256-2222455
  hypo
  ovary vs. liver_bileduct

SEQ ID NO: 473411 - DNA, 30 bp, Homo sapiens
  chr7:2264982-2265012
  hypo
  ovary vs. multiple_myeloma,melanoma
cgtgcacagcccccttgcttcctggggctg

SEQ ID NO: 473412 - DNA, 290 bp, Homo sapiens
  chr7:2265241-2265531
  hypo
  ovary vs. multiple_myeloma,melanoma
tgagtgactcagtgcagcagacacactccctgaggacccattcccgcaggtcccgtgctaagtcttgatgtggcccagccactgggctccaggctggggaacaggggaggggcaggaaacgggaaggtgaaaaagcctgggaagaggaagacgtcttttgagatgacattaagcatattagtgaaggcaacggcctcgaatgccacccatttatttaccagccaacggctccgtgggtcggaagtccagacgtaggtggctgcattctctgaccagggtctcccagacta

SEQ ID NO: 473413 - DNA, 361 bp, Homo sapiens; identical to SEQ ID NO: 364275
  chr7:2751985-2752346
  hypo
  ovary vs. liver_bileduct,sarcoma,uterine

SEQ ID NO: 473414 - DNA, 225 bp, Homo sapiens
  chr7:4856619-4856844
  hypo
  ovary vs. thyroid,lymphoid_neoplasm,myeloid_neoplasm, non_cancer,prostate,cervical,renal,breast,head_and_neck, pancreas_gallbladder,anorectal,sarcoma,lung,uterine,melanoma, colorectal
cgtttcaaggcgagggaaagggagctgggatggttctagggcttctgtgcgacctgaggaggagcgggtgtggggggtgcagctgggcctgtgcagaacctgcagccactgctccctgatgaagtggagcttgtcacggtcccctccctcagccccccagaaggctccttaggagagccacaggcacaagcttgagccccacttgatcccaggagctgcctgagt

SEQ ID NO: 473415 - DNA, 100 bp, Homo sapiens; identical to SEQ ID NO: 345898
  chr7:4857296-4857396
  hypo
  ovary vs. thyroid,lymphoid_neoplasm,myeloid_neoplasm, non_cancer,prostate,cervical,renal,breast,head_and_neck, pancreas_gallbladder,anorectal,sarcoma,lung,uterine,melanoma, colorectal

SEQ ID NO: 473416 - DNA, 112 bp, Homo sapiens; identical to SEQ ID NO: 470759
  chr7:4857860-4857972
  hypo

SEQ ID NO: 473417 - DNA, 237 bp, Homo sapiens; identical to SEQ ID NO: 339373
  chr7:5230941-5231178
  hypo
  ovary vs. head_and_neck

SEQ ID NO: 473418 - DNA, 183 bp, Homo sapiens; identical to SEQ ID NO: 339389
  chr7:6222712-6222895
  hypo
  ovary vs. upper_gi,melanoma

SEQ ID NO: 473419 - DNA, 210 bp, Homo sapiens; identical to SEQ ID NO: 457105
  chr7:7605822-7606032
  hypo
  ovary vs. melanoma,multiple_myeloma,sarcoma, lymphoid_neoplasm

SEQ ID NO: 473420 - DNA, 62 bp, Homo sapiens; identical to SEQ ID NO: 339445
  chr7:29390389-29390451
  hypo
  ovary vs. pancreas_gallbladder

SEQ ID NO: 473421 - DNA, 254 bp, Homo sapiens; identical to SEQ ID NO: 339463
  chr7:36124398-36124652
  hypo
  ovary vs. head_and_neck,anorectal,colorectal

SEQ ID NO: 473422 - DNA, 335 bp, Homo sapiens; identical to SEQ ID NO: 339465
  chr7:36352569-36352904
  hypo
  ovary vs. sarcoma

SEQ ID NO: 473423 - DNA, 259 bp, Homo sapiens; identical to SEQ ID NO: 364371
  chr7:42237185-42237444
  hypo
  ovary vs. head_and_neck

SEQ ID NO: 473424 - DNA, 51 bp, Homo sapiens; identical to SEQ ID NO: 348228
  chr7:44740672-44740723
  hypo
  ovary vs. lung,upper_gi,head_and_neck,liver_bileduct, sarcoma,colorectal,cervical,bladder_and_urothelial,breast, pancreas_gallbladder,melanoma,multiple_myeloma,anorectal, prostate,lymphoid_neoplasm,uterine,non_cancer

SEQ ID NO: 473425 - DNA, 3 bp, Homo sapiens
  chr7:44835105-44835108
  hypo
  ovary vs. uterine,multiple_myeloma,myeloid_neoplasm, renal,thyroid,non_cancer
cgg

SEQ ID NO: 473426 - DNA, 245 bp, Homo sapiens; identical to SEQ ID NO: 353998
  chr7:65877904-65878149
  hypo
  ovary vs. bladder_and_urothelial,renal, pancreas_gallbladder,lung,liver_bileduct

SEQ ID NO: 473427 - DNA, 1 bp, Homo sapiens
  chr7:97797696-97797697
  hypo
  ovary vs. renal
c

SEQ ID NO: 473428 - DNA, 343 bp, Homo sapiens
  chr7:100034752-100035095
  hypo
  ovary vs. uterine
cgcacctggccataaatggggcagctttaaggtaacggtccagtgtgccctgacctcccactcagacctgcacagcatttccggtgttccgttgcctccaaactcggaccggagttggcctgtatgagtgcgggcgagggtcgccgaccccatcccggactcccttctgggacacagcaactcttgcagctttttgtgactacttttaccttcgagagttccctgaaatattaatttgtataaaaagtagatatctggcacgggtgcggtagcgcatacctgcaattccaactctgggaggccaaggcgggaagatgtcttgaaaccctgagctggagacaag

SEQ ID NO: 473429 - DNA, 42 bp, Homo sapiens; identical to SEQ ID NO: 364455
  chr7:100035124-100035166
  hypo
  ovary vs. uterine

SEQ ID NO: 473430 - DNA, 236 bp, Homo sapiens; identical to SEQ ID NO: 339571
  chr7:100064586-100064822
  hypo
  ovary vs. cervical,colorectal,upper_gi,liver_bileduct, lymphoid_neoplasm,head_and_neck,prostate,breast,non_cancer, myeloid_neoplasm,melanoma,bladder_and_urothelial,lung,anorectal, multiple_myeloma

SEQ ID NO: 473431 - DNA, 32 bp, Homo sapiens; identical to SEQ ID NO: 460502
  chr7:105279344-105279376
  hypo
  ovary vs. thyroid,melanoma,liver_bileduct, lymphoid_neoplasm

SEQ ID NO: 473432 - DNA, 194 bp, Homo sapiens; identical to SEQ ID NO: 339621
  chr7:129470923-129471117
  hypo
  ovary vs. liver_bileduct,upper_gi,cervical, bladder_and_urothelial,uterine,anorectal,lung,head_and_neck

SEQ ID NO: 473433 - DNA, 128 bp, Homo sapiens; identical to SEQ ID NO: 339634
  chr7:134862682-134862810
  hypo
  ovary vs. lymphoid_neoplasm

SEQ ID NO: 473434 - DNA, 158 bp, Homo sapiens
  chr7:134880754-134880912
  hypo
  ovary vs. lymphoid_neoplasm,sarcoma,uterine,melanoma, prostate,colorectal,multiple_myeloma,pancreas_gallbladder, non_cancer,upper_gi,bladder_and_urothelial,myeloid_neoplasm, breast,renal
cgactcccatgactctactgccatgactgtggccctcgtccaagcccccattctccgccatctcctgctggccacacctccacgtgtactgcctgaaaatctgagcttcccagggtttccttggccccaggcccaacccacctgcagtgcatgatgga

SEQ ID NO: 473435 - DNA, 211 bp, Homo sapiens; identical to SEQ ID NO: 348256
  chr7:134880941-134881152
  hypo
  ovary vs. lymphoid_neoplasm,sarcoma,uterine,melanoma, prostate,colorectal,multiple_myeloma,pancreas_gallbladder, non_cancer,upper_gi,bladder_and_urothelial,myeloid_neoplasm, breast,renal

SEQ ID NO: 473436 - DNA, 170 bp, Homo sapiens
  chr7:138042035-138042205
  hypo
  ovary vs. prostate,uterine,colorectal, bladder_and_urothelial,cervical
cggccaggtttttttttttaacaaaagaatcaaccgatgcctcacaagaaacaaacgcagcgcctgcttcagtaccagtccaaggagtggtcctgtttacctttttgcccctccctgcctccctgcctgtgtctgctttttttgcaaggaaaaaaaaaatcaagacaaat

SEQ ID NO: 473437 - DNA, 3 bp, Homo sapiens
  chr7:138042344-138042347
  hypo
  ovary vs. prostate,uterine,colorectal, bladder_and_urothelial,cervical
gtc

SEQ ID NO: 473438 - DNA, 112 bp, Homo sapiens; identical to SEQ ID NO: 339669
  chr7:150006790-150006902
  hypo
  ovary vs. lung

SEQ ID NO: 473439 - DNA, 211 bp, Homo sapiens; identical to SEQ ID NO: 339687
  chr7:151411325-151411536
  hypo
  ovary vs. bladder_and_urothelial,lung,head_and_neck, liver_bileduct,uterine,renal,pancreas_gallbladder,breast, upper_gi,prostate,colorectal,lymphoid_neoplasm,melanoma

SEQ ID NO: 473440 - DNA, 28 bp, Homo sapiens
  chr7:155580882-155580910
  hypo
  ovary vs. melanoma
agctaaaaatccaaccaaggccgggcgc

SEQ ID NO: 473441 - DNA, 1 bp, Homo sapiens
  chr7:155581242-155581243
  hypo
  ovary vs. lymphoid_neoplasm,prostate,non_cancer, multiple_myeloma
c

SEQ ID NO: 473442 - DNA, 39 bp, Homo sapiens; identical to SEQ ID NO: 345928
  chr7:155581980-155582019
  hypo
  ovary vs. lymphoid_neoplasm,prostate,non_cancer, multiple_myeloma

SEQ ID NO: 473443 - DNA, 180 bp, Homo sapiens
  chr7:156832501-156832681
  hypo
  ovary vs. anorectal
cgcgggaccatcttataaggacacagtcacatcgaattgggggcccatcctactcctgcacagctaatcactaaccacatcttgttccgcagtaaagtcccattccgagacactggggctaggacttccacctgtctcttggacacatttcaacccgcagcaccaccactgaggaaacgc

SEQ ID NO: 473444 - DNA, 16 bp, Homo sapiens
  chr7:156833180-156833196
  hypo
  ovary vs. anorectal
tgcccttcgacagggc

SEQ ID NO: 473445 - DNA, 141 bp, Homo sapiens; identical to SEQ ID NO: 339731
  chr7:157281193-157281334
  hypo
  ovary vs. myeloid_neoplasm,breast

SEQ ID NO: 473446 - DNA, 413 bp, Homo sapiens
  chr7:158075395-158075808
  hypo
  ovary vs. anorectal,head_and_neck,uterine
cggctgatccctcctcgtgctcccacatgcagcagccagacacagacggctcatccctcctcgtgctcccacacacagcagccggacagacagctgatccctcctcgtgctcccacacacacagcagccggacacagatggcttgtccctccctgtgctcccacacacagcagcgggacacagagggctcatccctcctcatgctcccacacagcagcgggatatagacggtggtccctcctcgtgctcccacgcagcagcaggacatagacggctcgtccctcctcatgctcccacacgcacagcagccggacacagatggctgatccctcctcgtgctcccacatgcaggggcctcagctctcaggaggaaaacactcttgagagaagagaactgaggaaaggtagcgctg

SEQ ID NO: 473447 - DNA, 201 bp, Homo sapiens; identical to SEQ ID NO: 378454
  chr7:158075851-158076052
  hypo
  ovary vs. anorectal,head_and_neck,uterine

SEQ ID NO: 473448 - DNA, 479 bp, Homo sapiens; identical to SEQ ID NO: 354136
  chr7:158270795-158271274
  hypo
  ovary vs. head_and_neck,pancreas_gallbladder,colorectal

SEQ ID NO: 473449 - DNA, 515 bp, Homo sapiens; identical to SEQ ID NO: 463940
  chr7:158282327-158282842
  hypo
  ovary vs. anorectal

SEQ ID NO: 473450 - DNA, 162 bp, Homo sapiens; identical to SEQ ID NO: 364634
  chr7:158282873-158283035
  hypo
  ovary vs. anorectal

SEQ ID NO: 473451 - DNA, 70 bp, Homo sapiens; identical to SEQ ID NO: 455422
  chr7:158349387-158349457
  hypo
  ovary vs. pancreas_gallbladder,anorectal,colorectal, thyroid,prostate,upper_gi,uterine

SEQ ID NO: 473452 - DNA, 361 bp, Homo sapiens; identical to SEQ ID NO: 354138
  chr7:158349747-158350108
  hypo
  ovary vs. pancreas_gallbladder,anorectal,colorectal, thyroid,prostate,upper_gi,uterine

SEQ ID NO: 473453 - DNA, 125 bp, Homo sapiens; identical to SEQ ID NO: 459174
  chr8:8748226-8748351
  hypo
  ovary vs. bladder_and_urothelial,melanoma,breast

SEQ ID NO: 473454 - DNA, 85 bp, Homo sapiens; identical to SEQ ID NO: 459175
  chr8:8749088-8749173
  hypo
  ovary vs. bladder_and_urothelial,melanoma,breast

SEQ ID NO: 473455 - DNA, 533 bp, Homo sapiens; identical to SEQ ID NO: 354155
  chr8:8749088-8749621
  hypo
  ovary vs. melanoma,bladder_and_urothelial,breast, myeloid_neoplasm,prostate

SEQ ID NO: 473456 - DNA, 82 bp, Homo sapiens
  chr8:11708345-11708427
  hypo
  ovary vs. sarcoma,cervical,anorectal,multiple_myeloma
cgcttccccgccagccagcagggccttacccagcaggagccacaggagccctggtctctgatctctttgatggtgggacact

SEQ ID NO: 473457 - DNA, 130 bp, Homo sapiens; identical to SEQ ID NO: 339848
  chr8:12959279-12959409
  hypo
  ovary vs. sarcoma

SEQ ID NO: 473458 - DNA, 167 bp, Homo sapiens; identical to SEQ ID NO: 364688
  chr8:26193961-26194128
  hypo
  ovary vs. lung

SEQ ID NO: 473459 - DNA, 139 bp, Homo sapiens; identical to SEQ ID NO: 465785
  chr8:28938419-28938558
  hypo
  ovary vs. liver_bileduct,colorectal,thyroid,upper_gi, sarcoma,prostate

SEQ ID NO: 473460 - DNA, 136 bp, Homo sapiens; identical to SEQ ID NO: 212229
  chr8:28938587-28938723
  hypo
  ovary vs. liver_bileduct,colorectal,thyroid,upper_gi, sarcoma,prostate

SEQ ID NO: 473461 - DNA, 46 bp, Homo sapiens
  chr8:48044665-48044711
  hypo
  ovary vs. uterine,lung,colorectal
cgacgaacgccaagccaagccgttacatacgcatgcgcagaacacc

SEQ ID NO: 473462 - DNA, 30 bp, Homo sapiens
  chr8:48044753-48044783
  hypo
  ovary vs. uterine,lung,colorectal
ggcaagttactgcacgtggcagtgtccgac

SEQ ID NO: 473463 - DNA, 69 bp, Homo sapiens; identical to SEQ ID NO: 457170
  chr8:49334914-49334983
  hypo
  ovary vs. bladder_and_urothelial,uterine,melanoma, anorectal,head_and_neck,thyroid,renal,pancreas_gallbladder, cervical,prostate,non_cancer,sarcoma,lymphoid_neoplasm, colorectal

SEQ ID NO: 473464 - DNA, 143 bp, Homo sapiens; identical to SEQ ID NO: 364720
  chr8:49496420-49496563
  hypo
  ovary vs. cervical,head_and_neck,bladder_and_urothelial, uterine,anorectal,pancreas_gallbladder

SEQ ID NO: 473465 - DNA, 110 bp, Homo sapiens; identical to SEQ ID NO: 339945
  chr8:70246389-70246499
  hypo
  ovary vs. sarcoma,cervical,pancreas_gallbladder,renal, melanoma,prostate

SEQ ID NO: 473466 - DNA, 120 bp, Homo sapiens; identical to SEQ ID NO: 340001
  chr8:117631330-117631450
  hypo
  ovary vs. head_and_neck,lung,upper_gi,colorectal, anorectal,lymphoid_neoplasm,melanoma,pancreas_gallbladder

SEQ ID NO: 473467 - DNA, 149 bp, Homo sapiens; identical to SEQ ID NO: 340009
  chr8:123865814-123865963
  hypo
  ovary vs. bladder_and_urothelial

SEQ ID NO: 473468 - DNA, 62 bp, Homo sapiens; identical to SEQ ID NO: 457194
  chr8:128888848-128888910
  hypo
  ovary vs. melanoma,sarcoma,prostate,colorectal, non_cancer,lymphoid_neoplasm,liver_bileduct,uterine, multiple_myeloma

SEQ ID NO: 473469 - DNA, 43 bp, Homo sapiens; identical to SEQ ID NO: 345948
  chr8:128889422-128889465
  hypo
  ovary vs. melanoma,sarcoma,prostate,colorectal, non_cancer,lymphoid_neoplasm,liver_bileduct,uterine, multiple_myeloma

SEQ ID NO: 473470 - DNA, 440 bp, Homo sapiens; identical to SEQ ID NO: 340028
  chr8:128893135-128893575
  hypo
  ovary vs. lung,sarcoma,colorectal,pancreas_gallbladder, cervical,upper_gi,lymphoid_neoplasm,prostate,breast, liver_bileduct,bladder_and_urothelial,melanoma,uterine

SEQ ID NO: 473471 - DNA, 14 bp, Homo sapiens
  chr8:129070012-129070026
  hypo
  ovary vs. upper_gi,colorectal,prostate,cervical, liver_bileduct,lung,bladder_and_urothelial,renal,anorectal, lymphoid_neoplasm,non_cancer,pancreas_gallbladder,uterine, sarcoma,head_and_neck
cccacggtgtgtgc

SEQ ID NO: 473472 - DNA, 641 bp, Homo sapiens; identical to SEQ ID NO: 340050
  chr8:140937017-140937658
  hypo
  ovary vs. lung

SEQ ID NO: 473473 - DNA, 147 bp, Homo sapiens; identical to SEQ ID NO: 354246
  chr8:140963396-140963543
  hypo
  ovary vs. sarcoma,melanoma

SEQ ID NO: 473474 - DNA, 139 bp, Homo sapiens; identical to SEQ ID NO: 364830
  chr8:141107001-141107140
  hypo
  ovary vs. sarcoma,thyroid,melanoma

SEQ ID NO: 473475 - DNA, 140 bp, Homo sapiens; identical to SEQ ID NO: 354252
  chr8:141249621-141249761
  hypo
  ovary vs. bladder_and_urothelial,cervical,lung,prostate, anorectal,melanoma

SEQ ID NO: 473476 - DNA, 261 bp, Homo sapiens; identical to SEQ ID NO: 340060
  chr8:141458771-141459032
  hypo
  ovary vs. melanoma,uterine,breast,sarcoma,renal, bladder_and_urothelial,lymphoid_neoplasm,prostate

SEQ ID NO: 473477 - DNA, 12 bp, Homo sapiens
  chr8:141596808-141596820
  hypo
  ovary vs. renal,non_cancer,anorectal,cervical,prostate, breast,bladder_and_urothelial,lymphoid_neoplasm,thyroid, myeloid_neoplasm,multiple_myeloma,melanoma,colorectal, liver_bileduct,sarcoma,head_and_neck,upper_gi,lung,uterine,
  CONT. FROM ABOVE: pancreas_gallbladder
cgactgagcttc

SEQ ID NO: 473478 - DNA, 22 bp, Homo sapiens
  chr8:141597187-141597209
  hypo
  ovary vs. renal,non_cancer,anorectal,cervical,prostate, breast,bladder_and_urothelial,lymphoid_neoplasm,thyroid, myeloid_neoplasm,multiple_myeloma,melanoma,colorectal, liver_bileduct,sarcoma,head_and_neck,upper_gi,lung,uterine,
  CONT. FROM ABOVE: pancreas_gallbladder
agtccaggcacagacgcagctc

SEQ ID NO: 473479 - DNA, 68 bp, Homo sapiens; identical to SEQ ID NO: 345958
  chr8:143558643-143558711
  hypo
  ovary vs. pancreas_gallbladder,cervical,renal,melanoma, colorectal,thyroid,lymphoid_neoplasm,non_cancer,prostate, multiple_myeloma,bladder_and_urothelial,uterine,head_and_neck, anorectal,breast,upper_gi,myeloid_neoplasm

SEQ ID NO: 473480 - DNA, 42 bp, Homo sapiens; identical to SEQ ID NO: 465813
  chr8:144292304-144292346
  hypo
  ovary vs. prostate,thyroid

SEQ ID NO: 473481 - DNA, 254 bp, Homo sapiens; identical to SEQ ID NO: 364886
  chr8:144292470-144292724
  hypo
  ovary vs. prostate,thyroid

SEQ ID NO: 473482 - DNA, 2 bp, Homo sapiens
  chr8:144293575-144293577
  hypo
  ovary vs. multiple_myeloma,thyroid,sarcoma,melanoma, renal,prostate,anorectal,myeloid_neoplasm,non_cancer
cg

SEQ ID NO: 473483 - DNA, 202 bp, Homo sapiens; identical to SEQ ID NO: 364887
  chr8:144293893-144294095
  hypo
  ovary vs. multiple_myeloma,thyroid,sarcoma,melanoma, renal,prostate,anorectal,myeloid_neoplasm,non_cancer

SEQ ID NO: 473484 - DNA, 66 bp, Homo sapiens; identical to SEQ ID NO: 455465
  chr8:144343416-144343482
  hypo
  ovary vs. myeloid_neoplasm,thyroid

SEQ ID NO: 473485 - DNA, 228 bp, Homo sapiens; identical to SEQ ID NO: 455466
  chr8:144343992-144344220
  hypo
  ovary vs. myeloid_neoplasm,thyroid

SEQ ID NO: 473486 - DNA, 308 bp, Homo sapiens
  chr8:144380308-144380616
  hypo
  ovary vs. melanoma,anorectal,liver_bileduct, bladder_and_urothelial,multiple_myeloma,cervical,prostate
cggttgcaggattcgcccatcctggtctgggtgtggcttgtgaccacctcctgcagttctctgcccaggtaaggactaattgggaagaattctgggtcctgagctggctgccgcttccaagacagtcgctttgagggctcttggcaccgattttgttaaaatgcatgagcttagggttgtgcagcctgtaggggcaggggtggtctcagaatggatttggtggccccaccgttaattaagctcctgacccctgggccggtggtgaggtgggaagatgagcctgtgtctcccatgctgagccaagatcc

SEQ ID NO: 473487 - DNA, 214 bp, Homo sapiens; identical to SEQ ID NO: 354286
  chr8:144380645-144380859
  hypo
  ovary vs. melanoma,anorectal,liver_bileduct, bladder_and_urothelial,multiple_myeloma,cervical,prostate

SEQ ID NO: 473488 - DNA, 129 bp, Homo sapiens; identical to SEQ ID NO: 354287
  chr8:144383407-144383536
  hypo
  ovary vs. melanoma,anorectal,multiple_myeloma,thyroid, non_cancer,prostate,renal,cervical

SEQ ID NO: 473489 - DNA, 1 bp, Homo sapiens
  chr8:144617206-144617207
  hypo
  ovary vs. lung,head_and_neck,liver_bileduct, pancreas_gallbladder,upper_gi,uterine,cervical,breast, colorectal,melanoma,bladder_and_urothelial
c

SEQ ID NO: 473490 - DNA, 201 bp, Homo sapiens; identical to SEQ ID NO: 354305
  chr9:6868324-6868525
  hypo
  ovary vs. lung,head_and_neck,colorectal,liver_bileduct, upper_gi,pancreas_gallbladder

SEQ ID NO: 473491 - DNA, 295 bp, Homo sapiens; identical to SEQ ID NO: 457215
  chr9:35711931-35712226
  hypo
  ovary vs. thyroid,sarcoma

SEQ ID NO: 473492 - DNA, 41 bp, Homo sapiens; identical to SEQ ID NO: 340196
  chr9:35712966-35713007
  hypo
  ovary vs. lung,head_and_neck,bladder_and_urothelial

SEQ ID NO: 473493 - DNA, 473 bp, Homo sapiens; identical to SEQ ID NO: 472597
  chr9:79630544-79631017
  hypo
  ovary vs. breast,myeloid_neoplasm

SEQ ID NO: 473494 - DNA, 473 bp, Homo sapiens; identical to SEQ ID NO: 472597
  chr9:79630544-79631017
  hypo
  ovary vs. multiple_myeloma,myeloid_neoplasm,thyroid, breast,non_cancer,uterine

SEQ ID NO: 473495 - DNA, 330 bp, Homo sapiens; identical to SEQ ID NO: 340220
  chr9:81892891-81893221
  hypo
  ovary vs. cervical,sarcoma,head_and_neck, lymphoid_neoplasm,colorectal,breast

SEQ ID NO: 473496 - DNA, 280 bp, Homo sapiens; identical to SEQ ID NO: 340243
  chr9:96348822-96349102
  hypo
  ovary vs. liver_bileduct

SEQ ID NO: 473497 - DNA, 262 bp, Homo sapiens; identical to SEQ ID NO: 340254
  chr9:99139238-99139500
  hypo
  ovary vs. melanoma,lymphoid_neoplasm

SEQ ID NO: 473498 - DNA, 724 bp, Homo sapiens
  chr9:99258639-99259363
  hypo
  ovary vs. upper_gi,liver_bileduct,colorectal, pancreas_gallbladder
cgctggaaaagggaggagatggacagcgctgtacttaccaccaccaccaccaccacagggcctgtctcagggcttgagtttgtgtggacggcaaggactagcttcctgggccgctaactctcaaccgcaaggcaaacttgggttggggcccagaacggccgtcagccgttaccctccagcctggccagtgagtgctgagtggacactccgcggctacttaaggacacgccaaccgcggtcctgccggggcgctccgtgcgtctccctccggctgggtcccggctgaccccgcaatccaggcgcaggcaagggagaccccgctggctccaccgcccaggccaccctgaagtccccgctggaggaggtgcagcggacccgctcccggggagcccgtcccgcgccctccctccgagaagccccttcctccagctccttcctctgcccgccggcccgagagcaccgaggcggcttctctgtcctgtgtactgcccaggacaagcggcattggaagcgagtgagccgttcccagctgggggcagcaacagcccggggccagggaaacgcatgggggcctggaccgtccggtggcaccgagtaggcgggtgccaggacgccagacacgctgcattccccggagtcccacgccagggagaacggccccgcctgaaaagacgtcgtttaacacagagaaacacacccagggccaggagaaaccattgtcctc

SEQ ID NO: 473499 - DNA, 456 bp, Homo sapiens
  chr9:99258907-99259363
  hypo
  ovary vs. upper_gi,liver_bileduct
cggctgggtcccggctgaccccgcaatccaggcgcaggcaagggagaccccgctggctccaccgcccaggccaccctgaagtccccgctggaggaggtgcagcggacccgctcccggggagcccgtcccgcgccctccctccgagaagccccttcctccagctccttcctctgcccgccggcccgagagcaccgaggcggcttctctgtcctgtgtactgcccaggacaagcggcattggaagcgagtgagccgttcccagctgggggcagcaacagcccggggccagggaaacgcatgggggcctggaccgtccggtggcaccgagtaggcgggtgccaggacgccagacacgctgcattccccggagtcccacgccagggagaacggccccgcctgaaaagacgtcgtttaacacagagaaacacacccagggccaggagaaaccattgtcctc

SEQ ID NO: 473500 - DNA, 251 bp, Homo sapiens; identical to SEQ ID NO: 364998
  chr9:99259405-99259656
  hypo
  ovary vs. upper_gi,liver_bileduct

SEQ ID NO: 473501 - DNA, 115 bp, Homo sapiens; identical to SEQ ID NO: 378909
  chr9:100267724-100267839
  hypo
  ovary vs. pancreas_gallbladder

SEQ ID NO: 473502 - DNA, 321 bp, Homo sapiens; identical to SEQ ID NO: 340272
  chr9:110390680-110391001
  hypo
  ovary vs. anorectal,bladder_and_urothelial,breast, uterine,cervical,prostate,pancreas_gallbladder

SEQ ID NO: 473503 - DNA, 153 bp, Homo sapiens; identical to SEQ ID NO: 340277
  chr9:114860736-114860889
  hypo
  ovary vs. sarcoma

SEQ ID NO: 473504 - DNA, 43 bp, Homo sapiens
  chr9:116800647-116800690
  hypo
  ovary vs. pancreas_gallbladder,liver_bileduct,upper_gi, melanoma
cggagtggagccgtgggctgctttgttctggttcagcgcagcc

SEQ ID NO: 473505 - DNA, 563 bp, Homo sapiens; identical to SEQ ID NO: 354365
  chr9:116800730-116801293
  hypo
  ovary vs. pancreas_gallbladder,liver_bileduct,upper_gi, melanoma

SEQ ID NO: 473506 - DNA, 213 bp, Homo sapiens; identical to SEQ ID NO: 378951
  chr9:123146246-123146459
  hypo

SEQ ID NO: 473507 - DNA, 99 bp, Homo sapiens; identical to SEQ ID NO: 365037
  chr9:124816011-124816110
  hypo
  ovary vs. liver_bileduct

SEQ ID NO: 473508 - DNA, 166 bp, Homo sapiens; identical to SEQ ID NO: 354372
  chr9:126158115-126158281
  hypo
  ovary vs. cervical,myeloid_neoplasm,breast, bladder_and_urothelial,colorectal,uterine,head_and_neck, liver_bileduct,non_cancer,renal,melanoma,prostate

SEQ ID NO: 473509 - DNA, 203 bp, Homo sapiens; identical to SEQ ID NO: 340315
  chr9:126180763-126180966
  hypo
  ovary vs. breast,bladder_and_urothelial,sarcoma, head_and_neck,melanoma,upper_gi,anorectal,pancreas_gallbladder, liver_bileduct,multiple_myeloma,cervical,colorectal,prostate, thyroid,lymphoid_neoplasm,renal

SEQ ID NO: 473510 - DNA, 196 bp, Homo sapiens; identical to SEQ ID NO: 354383
  chr9:130496563-130496759
  hypo
  ovary vs. uterine,anorectal,multiple_myeloma

SEQ ID NO: 473511 - DNA, 17 bp, Homo sapiens
  chr9:132403240-132403257
  hypo
  ovary vs. myeloid_neoplasm,thyroid,multiple_myeloma, lymphoid_neoplasm
ttgcccagagtccggtc

SEQ ID NO: 473512 - DNA, 277 bp, Homo sapiens; identical to SEQ ID NO: 340350
  chr9:132633604-132633881
  hypo
  ovary vs. liver_bileduct,lung,colorectal, bladder_and_urothelial,head_and_neck,sarcoma,breast,cervical, renal,upper_gi,pancreas_gallbladder,melanoma,anorectal, lymphoid_neoplasm,myeloid_neoplasm,prostate,multiple_myeloma,
  CONT. FROM ABOVE: non_cancer,thyroid

SEQ ID NO: 473513 - DNA, 344 bp, Homo sapiens
  chr9:132881052-132881396
  hypo
  ovary vs. myeloid_neoplasm,upper_gi,prostate,thyroid, melanoma,non_cancer,pancreas_gallbladder,liver_bileduct, colorectal,multiple_myeloma,bladder_and_urothelial,uterine
cgatgattctgttgctcacccccattaagaaccattgctataaaggaattctcctccacatgaggaggtcgatgcctggagacagaggcagcaggccaagggcaggcacacccagctgagatggggcagggctggaaggcaggcctcctggatcctgcctggggccttgtctctctccccacactcattctttcaccgtatttgctgctcctcatggtgaggtcagaaatagcccgcccagccttggtgagccttcgctcccacaggagcccaacacccagcccgccacagtccggtgagcagcaggctgtcggtgttcctaagtcagggaaatctttggaaga

SEQ ID NO: 473514 - DNA, 35 bp, Homo sapiens; identical to SEQ ID NO: 348379
  chr9:132881495-132881530
  hypo
  ovary vs. myeloid_neoplasm,upper_gi,prostate,thyroid, melanoma,non_cancer,pancreas_gallbladder,liver_bileduct, colorectal,multiple_myeloma,bladder_and_urothelial,uterine

SEQ ID NO: 473515 - DNA, 3 bp, Homo sapiens
  chr9:138562692-138562695
  hypo
  ovary vs. thyroid,renal,non_cancer
cgc

SEQ ID NO: 473516 - DNA, 52 bp, Homo sapiens; identical to SEQ ID NO: 365129
  chr9:138563280-138563332
  hypo
  ovary vs. thyroid,renal,non_cancer

SEQ ID NO: 473517 - DNA, 51 bp, Homo sapiens; identical to SEQ ID NO: 354417
  chr9:138661962-138662013
  hypo
  ovary vs. thyroid,renal,non_cancer,prostate, lymphoid_neoplasm

SEQ ID NO: 473518 - DNA, 37 bp, Homo sapiens; identical to SEQ ID NO: 354440
  chr9:139818622-139818659
  hypo
  ovary vs. melanoma,anorectal,colorectal, bladder_and_urothelial,uterine,breast,prostate,sarcoma, non_cancer,upper_gi,multiple_myeloma

SEQ ID NO: 473519 - DNA, 216 bp, Homo sapiens; identical to SEQ ID NO: 365170
  chr9:139901954-139902170
  hypo
  ovary vs. upper_gi

SEQ ID NO: 473520 - DNA, 32 bp, Homo sapiens
  chr9:140030217-140030249
  hypo
  ovary vs. renal,melanoma,pancreas_gallbladder,prostate, myeloid_neoplasm,colorectal,non_cancer,breast,cervical, lymphoid_neoplasm,thyroid,sarcoma
cgcgcccggctgggaggtgttctttctagacc

SEQ ID NO: 473521 - DNA, 11 bp, Homo sapiens
  chr9:140030575-140030586
  hypo
  ovary vs. renal,melanoma,pancreas_gallbladder,prostate, myeloid_neoplasm,colorectal,non_cancer,breast,cervical, lymphoid_neoplasm,thyroid,sarcoma
tgcctgcggtc

SEQ ID NO: 473522 - DNA, 613 bp, Homo sapiens; identical to SEQ ID NO: 340474
  chr9:140110575-140111188
  hypo
  ovary vs. liver_bileduct,head_and_neck,lung

SEQ ID NO: 473523 - DNA, 374 bp, Homo sapiens
  chr9:140265361-140265735
  hypo
  ovary vs. breast,anorectal,prostate,thyroid, lymphoid_neoplasm,cervical,non_cancer,renal,sarcoma,uterine, lung
cgctgccctcgacatgaaatatcgcagcacattgagtcgtgagtcccagctaatccgagcggacaggcctgaatgcggcctctttcggccgggcgcggcggtgagcagtggagcatgcatcgcctgccgggcggccccgctcggggacaatggctttcttcgcagaaggggcctgtgcgggacaagaccccctttgtgtggggattcctgcctcggagcgcgagggaggcgcattcagccggccccagacagtctttgaaaggctctgtaacagaagacggcccgaaacactagcctgccttctgcctccctgcactctccgcaggcacggccgccattcagcgtcgcgccacatgagggggaccctccatcct

SEQ ID NO: 473524 - DNA, 183 bp, Homo sapiens; identical to SEQ ID NO: 348403
  chr9:140265902-140266085
  hypo
  ovary vs. breast,anorectal,prostate,thyroid, lymphoid_neoplasm,cervical,non_cancer,renal,sarcoma,uterine, lung

SEQ ID NO: 473525 - DNA, 184 bp, Homo sapiens; identical to SEQ ID NO: 465859
  chr9:140400692-140400876
  hypo

SEQ ID NO: 473526 - DNA, 517 bp, Homo sapiens; identical to SEQ ID NO: 465860
  chr9:140400905-140401422
  hypo

SEQ ID NO: 473527 - DNA, 2 bp, Homo sapiens
  chr9:140401590-140401592
  hypo
ac

SEQ ID NO: 473528 - DNA, 232 bp, Homo sapiens; identical to SEQ ID NO: 340489
  chr9:140645189-140645421
  hypo
  ovary vs. lung,upper_gi,head_and_neck, pancreas_gallbladder,colorectal,liver_bileduct,breast,prostate

SEQ ID NO: 473529 - DNA, 189 bp, Homo sapiens; identical to SEQ ID NO: 471345
  chr9:140703858-140704047
  hypo
  ovary vs. uterine,upper_gi,renal,pancreas_gallbladder, breast,lung,melanoma,colorectal,bladder_and_urothelial,cervical, liver_bileduct,head_and_neck,thyroid,prostate,non_cancer, myeloid_neoplasm

SEQ ID NO: 473530 - DNA, 327 bp, Homo sapiens; identical to SEQ ID NO: 345340
  chr9:140704131-140704458
  hypo
  ovary vs. uterine,upper_gi,renal,pancreas_gallbladder, breast,lung,melanoma,colorectal,bladder_and_urothelial,cervical, liver_bileduct,head_and_neck,thyroid,prostate,non_cancer, myeloid_neoplasm

SEQ ID NO: 473531 - DNA, 15 bp, Homo sapiens
  chrX:44730007-44730022
  hypo
  ovary vs. head_and_neck
ctgagacggagtctc

SEQ ID NO: 473532 - DNA, 59 bp, Homo sapiens; identical to SEQ ID NO: 464009
  chr1:1566482-1566541
  hyper
  pancreas_gallbladder vs. anorectal

SEQ ID NO: 473533 - DNA, 3 bp, Homo sapiens
  chr1:4716701-4716704
  hyper
  pancreas_gallbladder vs. liver_bileduct
agc

SEQ ID NO: 473534 - DNA, 426 bp, Homo sapiens; identical to SEQ ID NO: 457245
  chr1:9711649-9712075
  hyper
  pancreas_gallbladder vs. lymphoid_neoplasm,prostate, head_and_neck,sarcoma,lung,multiple_myeloma, bladder_and_urothelial,non_cancer,uterine,myeloid_neoplasm, breast,ovary,thyroid

SEQ ID NO: 473535 - DNA, 53 bp, Homo sapiens; identical to SEQ ID NO: 462206
  chr1:11538821-11538874
  hyper
  pancreas_gallbladder vs. cervical,melanoma,ovary,breast, anorectal,prostate,head_and_neck,colorectal,uterine

SEQ ID NO: 473536 - DNA, 64 bp, Homo sapiens; identical to SEQ ID NO: 346318
  chr1:12123950-12124014
  hyper
  pancreas_gallbladder vs. lymphoid_neoplasm

SEQ ID NO: 473537 - DNA, 57 bp, Homo sapiens
  chr1:13840257-13840314
  hyper
  pancreas_gallbladder vs. head_and_neck
cggactggggagccgggacagcagggatggagaggggaggggcggggagggaggggc

SEQ ID NO: 473538 - DNA, 265 bp, Homo sapiens
  chr1:13840257-13840522
  hyper
  pancreas_gallbladder vs. head_and_neck
cggactggggagccgggacagcagggatggagaggggaggggcggggagggaggggcgagggactcaccaaagggtttacccggacaggaaattaacccgctagaaaaatctcttgggagaggcgggagcggcaggggtggccgagtggccgtcgccaaaacgcggccccaccctggcagctgatttccgagatctggcagtaagacgccgcgcgcaccgggcgggctgcactcgacgtctaagttcagctaccaagcccaggag

SEQ ID NO: 473539 - DNA, 87 bp, Homo sapiens; identical to SEQ ID NO: 349178
  chr1:13910927-13911014
  hyper
  pancreas_gallbladder vs. anorectal,head_and_neck

SEQ ID NO: 473540 - DNA, 169 bp, Homo sapiens; identical to SEQ ID NO: 349179
  chr1:14926204-14926373
  hyper
  pancreas_gallbladder vs. lung,anorectal,head_and_neck

SEQ ID NO: 473541 - DNA, 530 bp, Homo sapiens; identical to SEQ ID NO: 468550
  chr1:17445328-17445858
  hyper
  pancreas_gallbladder vs. upper_gi

SEQ ID NO: 473542 - DNA, 144 bp, Homo sapiens; identical to SEQ ID NO: 356681
  chr1:17445943-17446087
  hyper
  pancreas_gallbladder vs. upper_gi

SEQ ID NO: 473543 - DNA, 57 bp, Homo sapiens; identical to SEQ ID NO: 464015
  chr1:18960805-18960862
  hyper
  pancreas_gallbladder vs. liver_bileduct

SEQ ID NO: 473544 - DNA, 33 bp, Homo sapiens; identical to SEQ ID NO: 454089
  chr1:25255579-25255612
  hyper
  pancreas_gallbladder vs. lymphoid_neoplasm,cervical, head_and_neck

SEQ ID NO: 473545 - DNA, 7 bp, Homo sapiens
  chr1:25255934-25255941
  hyper
  pancreas_gallbladder vs. lymphoid_neoplasm,cervical, head_and_neck
agccaga

SEQ ID NO: 473546 - DNA, 130 bp, Homo sapiens; identical to SEQ ID NO: 454093
  chr1:32410105-32410235
  hyper
  pancreas_gallbladder vs. upper_gi

SEQ ID NO: 473547 - DNA, 158 bp, Homo sapiens; identical to SEQ ID NO: 459263
  chr1:34629913-34630071
  hyper

SEQ ID NO: 473548 - DNA, 225 bp, Homo sapiens; identical to SEQ ID NO: 457259
  chr1:34629913-34630138
  hyper

SEQ ID NO: 473549 - DNA, 121 bp, Homo sapiens; identical to SEQ ID NO: 459266
  chr1:35394922-35395043
  hyper
  pancreas_gallbladder vs. ovary,breast,uterine,lung, prostate

SEQ ID NO: 473550 - DNA, 113 bp, Homo sapiens; identical to SEQ ID NO: 346333
  chr1:35396131-35396244
  hyper
  pancreas_gallbladder vs. uterine

SEQ ID NO: 473551 - DNA, 21 bp, Homo sapiens
  chr1:36042458-36042479
  hyper
  pancreas_gallbladder vs. renal
cgggacgcggccgcgcggact

SEQ ID NO: 473552 - DNA, 1 bp, Homo sapiens
  chr1:38512479-38512480
  hyper
  pancreas_gallbladder vs. head_and_neck
c

SEQ ID NO: 473553 - DNA, 2 bp, Homo sapiens
  chr1:46951168-46951170
  hyper
  pancreas_gallbladder vs. multiple_myeloma
cg

SEQ ID NO: 473554 - DNA, 255 bp, Homo sapiens; identical to SEQ ID NO: 346339
  chr1:46957171-46957426
  hyper
  pancreas_gallbladder vs. myeloid_neoplasm,non_cancer

SEQ ID NO: 473555 - DNA, 120 bp, Homo sapiens; identical to SEQ ID NO: 452723
  chr1:77333644-77333764
  hyper
  pancreas_gallbladder vs. ovary

SEQ ID NO: 473556 - DNA, 142 bp, Homo sapiens; identical to SEQ ID NO: 344962
  chr1:92949466-92949608
  hyper
  pancreas_gallbladder vs. colorectal

SEQ ID NO: 473557 - DNA, 289 bp, Homo sapiens; identical to SEQ ID NO: 452731
  chr1:101702081-101702370
  hyper
  pancreas_gallbladder vs. sarcoma,uterine, myeloid_neoplasm,non_cancer,ovary,thyroid,prostate, bladder_and_urothelial

SEQ ID NO: 473558 - DNA, 152 bp, Homo sapiens; identical to SEQ ID NO: 452732
  chr1:101702796-101702948
  hyper
  pancreas_gallbladder vs. sarcoma,uterine, myeloid_neoplasm,non_cancer,ovary,thyroid,prostate, bladder_and_urothelial

SEQ ID NO: 473559 - DNA, 393 bp, Homo sapiens; identical to SEQ ID NO: 452733
  chr1:101702796-101703189
  hyper
  pancreas_gallbladder vs. sarcoma,uterine,prostate, non_cancer,myeloid_neoplasm

SEQ ID NO: 473560 - DNA, 306 bp, Homo sapiens; identical to SEQ ID NO: 452735
  chr1:108506290-108506596
  hyper
  pancreas_gallbladder vs. multiple_myeloma,non_cancer

SEQ ID NO: 473561 - DNA, 18 bp, Homo sapiens
  chr1:115631850-115631868
  hyper
  pancreas_gallbladder vs. bladder_and_urothelial, colorectal,lung
cgcctccgcgtttgagca

SEQ ID NO: 473562 - DNA, 30 bp, Homo sapiens; identical to SEQ ID NO: 462250
  chr1:115631915-115631945
  hyper
  pancreas_gallbladder vs. bladder_and_urothelial, colorectal,lung

SEQ ID NO: 473563 - DNA, 4 bp, Homo sapiens
  chr1:115632637-115632641
  hyper
  pancreas_gallbladder vs. bladder_and_urothelial, colorectal,lung
cctc

SEQ ID NO: 473564 - DNA, 35 bp, Homo sapiens; identical to SEQ ID NO: 349311
  chr1:115632692-115632727
  hyper
  pancreas_gallbladder vs. bladder_and_urothelial, colorectal,lung

SEQ ID NO: 473565 - DNA, 43 bp, Homo sapiens; identical to SEQ ID NO: 455561
  chr1:156390054-156390097
  hyper
  pancreas_gallbladder vs. multiple_myeloma,non_cancer, thyroid,lymphoid_neoplasm,prostate

SEQ ID NO: 473566 - DNA, 104 bp, Homo sapiens; identical to SEQ ID NO: 455562
  chr1:158083079-158083183
  hyper
  pancreas_gallbladder vs. uterine,ovary,colorectal,renal, lung,non_cancer,myeloid_neoplasm,lymphoid_neoplasm,cervical, sarcoma,thyroid

SEQ ID NO: 473567 - DNA, 712 bp, Homo sapiens; identical to SEQ ID NO: 349339
  chr1:161409991-161410703
  hyper
  pancreas_gallbladder vs. upper_gi

SEQ ID NO: 473568 - DNA, 109 bp, Homo sapiens; identical to SEQ ID NO: 462262
  chr1:161591364-161591473
  hyper
  pancreas_gallbladder vs. lung

SEQ ID NO: 473569 - DNA, 83 bp, Homo sapiens; identical to SEQ ID NO: 462263
  chr1:161591546-161591629
  hyper
  pancreas_gallbladder vs. lung

SEQ ID NO: 473570 - DNA, 250 bp, Homo sapiens; identical to SEQ ID NO: 454103
  chr1:182583799-182584049
  hyper
  pancreas_gallbladder vs. cervical,ovary,lung,breast, uterine,head_and_neck,renal,upper_gi,prostate,multiple_myeloma, non_cancer,myeloid_neoplasm,thyroid,lymphoid_neoplasm,melanoma, sarcoma,colorectal,anorectal

SEQ ID NO: 473571 - DNA, 40 bp, Homo sapiens; identical to SEQ ID NO: 344983
  chr1:182584613-182584653
  hyper
  pancreas_gallbladder vs. cervical,ovary,lung,breast, uterine,head_and_neck,renal,upper_gi,prostate,multiple_myeloma, non_cancer,myeloid_neoplasm,thyroid,lymphoid_neoplasm,melanoma, sarcoma,colorectal,anorectal

SEQ ID NO: 473572 - DNA, 5 bp, Homo sapiens
  chr1:214155737-214155742
  hyper
  pancreas_gallbladder vs. liver_bileduct,colorectal
cgtcc

SEQ ID NO: 473573 - DNA, 116 bp, Homo sapiens; identical to SEQ ID NO: 346393
  chr1:214156950-214157066
  hyper
  pancreas_gallbladder vs. liver_bileduct,colorectal

SEQ ID NO: 473574 - DNA, 60 bp, Homo sapiens
  chr1:214159503-214159563
  hyper
  pancreas_gallbladder vs. liver_bileduct
cggttagaacacctgatacaacagtcaatagttggaggtgtgagtggtgcgtgtgcgctc

SEQ ID NO: 473575 - DNA, 411 bp, Homo sapiens
  chr1:214159697-214160108
  hyper
  pancreas_gallbladder vs. liver_bileduct
tctccttttcactgtttgaaattcgtgccaaaagtttcctgccgggatagactcggacatactaacatcgctattcttattcaaagggagggcttaatatcctctttacggtttggtgaatttgaggctgaaattgtaaattccctaggaaggagtgtgtgtgtgtgtgtgtcgcagaagacattggtagtgtttggccagtgtacttgtaacacacctcataaataccctgttgtcacgacacagcatgattcaacctttgatctgattaaatttgagggacacacgaagactacttgtcctcctcctacttacaaaaatgagtgtctaatagactatgtatgaatgtttctgcttcgcagctcttgcaagtcccagcttttataggatctttaggtcataaacgcggct

SEQ ID NO: 473576 - DNA, 158 bp, Homo sapiens; identical to SEQ ID NO: 457303
  chr1:214162300-214162458
  hyper
  pancreas_gallbladder vs. liver_bileduct,colorectal

SEQ ID NO: 473577 - DNA, 4 bp, Homo sapiens
  chr1:214162850-214162854
  hyper
  pancreas_gallbladder vs. liver_bileduct,colorectal
tacc

SEQ ID NO: 473578 - DNA, 593 bp, Homo sapiens
  chr1:220701523-220702116
  hyper
  pancreas_gallbladder vs. head_and_neck,cervical
cgctgctccgcgcgcagccggctcgggccgctcctcctgactgaggcgcggcggcggcggtggctgtgaccgcgcggaccgagccgagacattcgcgccgggggatcgggcgccgccgccgctgggccccgggcgcgtggatgcggctgggtcgggcggcgccgtacacctgaggcggagaacggggcgcggcgcgggtgacgctgtcagggccgcggttcctgacgcccaggcgctcgccaggacgagccaggcagtgatttgaggcaccggcttcaccttcacccatggtccggagagcctagcggggctcgccaccgcctcccggctccccttccacgcctcatcctgccagcctcgccgccccgccagcgccgggcaaccgcctcgcccgaagccctccctcgttactgtccgcataccccggcggcgccgccgcgggaagcggctccccctcctcttcctccgcgtcctcttccctctttcccccgccggggccgcttgttgcaccgccccgcggcctgcgggagccgctcgccccggccttgtgctcgcgtccgcacccctttcctgtcgccccccggggcccgcac

SEQ ID NO: 473579 - DNA, 35 bp, Homo sapiens; identical to SEQ ID NO: 454106
  chr1:226924738-226924773
  hyper
  pancreas_gallbladder vs. non_cancer,prostate, multiple_myeloma,lymphoid_neoplasm,myeloid_neoplasm

SEQ ID NO: 473580 - DNA, 4 bp, Homo sapiens
  chr1:237205156-237205160
  hyper
  pancreas_gallbladder vs. sarcoma
cgtg

SEQ ID NO: 473581 - DNA, 37 bp, Homo sapiens; identical to SEQ ID NO: 466027
  chr1:237205188-237205225
  hyper
  pancreas_gallbladder vs. sarcoma

SEQ ID NO: 473582 - DNA, 8 bp, Homo sapiens
  chr1:242688695-242688703
  hyper
  pancreas_gallbladder vs. lung
aggtggac

SEQ ID NO: 473583 - DNA, 177 bp, Homo sapiens; identical to SEQ ID NO: 331181
  chr1:248406552-248406729
  hyper
  pancreas_gallbladder vs. upper_gi

SEQ ID NO: 473584 - DNA, 96 bp, Homo sapiens; identical to SEQ ID NO: 345341
  chr10:1780056-1780152
  hyper
  pancreas_gallbladder vs. liver_bileduct

SEQ ID NO: 473585 - DNA, 57 bp, Homo sapiens; identical to SEQ ID NO: 459299
  chr10:7449898-7449955
  hyper
  pancreas_gallbladder vs. renal

SEQ ID NO: 473586 - DNA, 61 bp, Homo sapiens; identical to SEQ ID NO: 459300
  chr10:7453036-7453097
  hyper
  pancreas_gallbladder vs. renal,breast,melanoma, multiple_myeloma

SEQ ID NO: 473587 - DNA, 61 bp, Homo sapiens; identical to SEQ ID NO: 459300
  chr10:7453036-7453097
  hyper
  pancreas_gallbladder vs. melanoma,breast,renal

SEQ ID NO: 473588 - DNA, 229 bp, Homo sapiens; identical to SEQ ID NO: 459302
  chr10:7454077-7454306
  hyper
  pancreas_gallbladder vs. breast

SEQ ID NO: 473589 - DNA, 79 bp, Homo sapiens; identical to SEQ ID NO: 460618
  chr10:8095120-8095199
  hyper
  pancreas_gallbladder vs. bladder_and_urothelial

SEQ ID NO: 473590 - DNA, 100 bp, Homo sapiens; identical to SEQ ID NO: 460619
  chr10:8095845-8095945
  hyper
  pancreas_gallbladder vs. bladder_and_urothelial

SEQ ID NO: 473591 - DNA, 42 bp, Homo sapiens; identical to SEQ ID NO: 350990
  chr10:11060746-11060788
  hyper
  pancreas_gallbladder vs. colorectal,lung

SEQ ID NO: 473592 - DNA, 101 bp, Homo sapiens; identical to SEQ ID NO: 457323
  chr10:11207330-11207431
  hyper
  pancreas_gallbladder vs. melanoma

SEQ ID NO: 473593 - DNA, 156 bp, Homo sapiens; identical to SEQ ID NO: 459304
  chr10:11207724-11207880
  hyper
  pancreas_gallbladder vs. melanoma

SEQ ID NO: 473594 - DNA, 100 bp, Homo sapiens; identical to SEQ ID NO: 468630
  chr10:13933035-13933135
  hyper
  pancreas_gallbladder vs. ovary,bladder_and_urothelial, uterine,multiple_myeloma,lung,myeloid_neoplasm

SEQ ID NO: 473595 - DNA, 191 bp, Homo sapiens; identical to SEQ ID NO: 468631
  chr10:13933246-13933437
  hyper
  pancreas_gallbladder vs. ovary,bladder_and_urothelial, uterine,multiple_myeloma,lung,myeloid_neoplasm

SEQ ID NO: 473596 - DNA, 209 bp, Homo sapiens; identical to SEQ ID NO: 452758
  chr10:17270445-17270654
  hyper
  pancreas_gallbladder vs. melanoma

SEQ ID NO: 473597 - DNA, 116 bp, Homo sapiens; identical to SEQ ID NO: 345346
  chr10:17272233-17272349
  hyper
  pancreas_gallbladder vs. sarcoma,melanoma

SEQ ID NO: 473598 - DNA, 15 bp, Homo sapiens
  chr10:17495988-17496003
  hyper
  pancreas_gallbladder vs. breast,ovary
cgaccccctccccca

SEQ ID NO: 473599 - DNA, 117 bp, Homo sapiens; identical to SEQ ID NO: 452760
  chr10:18429033-18429150
  hyper
  pancreas_gallbladder vs. colorectal

SEQ ID NO: 473600 - DNA, 49 bp, Homo sapiens; identical to SEQ ID NO: 351003
  chr10:18430247-18430296
  hyper
  pancreas_gallbladder vs. colorectal

SEQ ID NO: 473601 - DNA, 103 bp, Homo sapiens; identical to SEQ ID NO: 454114
  chr10:22517909-22518012
  hyper

SEQ ID NO: 473602 - DNA, 61 bp, Homo sapiens; identical to SEQ ID NO: 454115
  chr10:22518450-22518511
  hyper

SEQ ID NO: 473603 - DNA, 32 bp, Homo sapiens; identical to SEQ ID NO: 345349
  chr10:22626103-22626135
  hyper
  pancreas_gallbladder vs. prostate,myeloid_neoplasm, non_cancer,uterine,head_and_neck,sarcoma,cervical

SEQ ID NO: 473604 - DNA, 791 bp, Homo sapiens; identical to SEQ ID NO: 457329
  chr10:31607954-31608745
  hyper
  pancreas_gallbladder vs. liver_bileduct

SEQ ID NO: 473605 - DNA, 467 bp, Homo sapiens; identical to SEQ ID NO: 457330
  chr10:31608278-31608745
  hyper
  pancreas_gallbladder vs. liver_bileduct

SEQ ID NO: 473606 - DNA, 94 bp, Homo sapiens; identical to SEQ ID NO: 351040
  chr10:50606762-50606856
  hyper
  pancreas_gallbladder vs. melanoma,prostate, bladder_and_urothelial,sarcoma,head_and_neck

SEQ ID NO: 473607 - DNA, 12 bp, Homo sapiens
  chr10:52177724-52177736
  hyper
  pancreas_gallbladder vs. upper_gi,liver_bileduct, bladder_and_urothelial,head_and_neck,uterine,cervical,breast, colorectal,renal,ovary,lymphoid_neoplasm,lung,non_cancer, anorectal,sarcoma
cgccgtagtaga

SEQ ID NO: 473608 - DNA, 314 bp, Homo sapiens
  chr10:60935996-60936310
  hyper
  pancreas_gallbladder vs. liver_bileduct
ccaattcttggtaaacaacaaacatgctcgccctcgcctccccgtgcagacgcctcagggccaactcgggcttcgccaggcaccgagagcagacagaagacgccaaatggctatcaccaggagagagggcgaggcagccgcgcggcgtatagcgctcgcccttcccgcgcgctcggtcgcccgacgcctcacgcgcgaggttgccttggcagtggctggagggcaggtgggggcgcgtgcgcgcagaagggcgggggagggaccaccgcgcgccagcaggtgggcgcgttctcccgcgcgcgtgcgcgcgtcga

SEQ ID NO: 473609 - DNA, 81 bp, Homo sapiens
  chr10:60936229-60936310
  hyper
  pancreas_gallbladder vs. liver_bileduct
cgcgtgcgcgcagaagggcgggggagggaccaccgcgcgccagcaggtgggcgcgttctcccgcgcgcgtgcgcgcgtcga

SEQ ID NO: 473610 - DNA, 73 bp, Homo sapiens; identical to SEQ ID NO: 347093
  chr10:64578688-64578761
  hyper
  pancreas_gallbladder vs. anorectal,cervical, head_and_neck,breast,bladder_and_urothelial,thyroid,ovary, non_cancer,renal

SEQ ID NO: 473611 - DNA, 85 bp, Homo sapiens; identical to SEQ ID NO: 454120
  chr10:79396547-79396632
  hyper
  pancreas_gallbladder vs. breast,multiple_myeloma,renal, thyroid,non_cancer

SEQ ID NO: 473612 - DNA, 91 bp, Homo sapiens
  chr10:85954199-85954290
  hyper
  pancreas_gallbladder vs. colorectal, bladder_and_urothelial,uterine,breast,prostate
cgccggcaaagggggcgtggcgggcggggagtcctcttgtcacgccctcctgcccccgcccgcggctgggagcctgtcgctccgctctgcg

SEQ ID NO: 473613 - DNA, 4 bp, Homo sapiens
  chr10:85955105-85955109
  hyper
  pancreas_gallbladder vs. colorectal, bladder_and_urothelial,uterine,breast,prostate
cctc

SEQ ID NO: 473614 - DNA, 19 bp, Homo sapiens
  chr10:90968169-90968188
  hyper
  pancreas_gallbladder vs. lung,uterine,sarcoma,ovary
ctccgggcccacggagccc

SEQ ID NO: 473615 - DNA, 1 bp, Homo sapiens
  chr10:92616995-92616996
  hyper
  pancreas_gallbladder vs. bladder_and_urothelial
c

SEQ ID NO: 473616 - DNA, 82 bp, Homo sapiens; identical to SEQ ID NO: 459323
  chr10:92617016-92617098
  hyper
  pancreas_gallbladder vs. bladder_and_urothelial

SEQ ID NO: 473617 - DNA, 278 bp, Homo sapiens; identical to SEQ ID NO: 459324
  chr10:92617539-92617817
  hyper
  pancreas_gallbladder vs. bladder_and_urothelial

SEQ ID NO: 473618 - DNA, 20 bp, Homo sapiens
  chr10:100993468-100993488
  hyper
  pancreas_gallbladder vs. breast,multiple_myeloma,thyroid, myeloid_neoplasm,non_cancer,prostate,bladder_and_urothelial, renal,ovary,sarcoma,cervical,lymphoid_neoplasm
cgtggctaccccagggtctt

SEQ ID NO: 473619 - DNA, 124 bp, Homo sapiens; identical to SEQ ID NO: 345364
  chr10:100994695-100994819
  hyper
  pancreas_gallbladder vs. breast,non_cancer, myeloid_neoplasm,thyroid,bladder_and_urothelial,renal, multiple_myeloma,prostate,ovary,sarcoma,cervical,upper_gi

SEQ ID NO: 473620 - DNA, 73 bp, Homo sapiens
  chr10:102475189-102475262
  hyper
  pancreas_gallbladder vs. colorectal
cgtggagaagggcagagacagagaccaacgaagtggggtcgggtagaaagaggcggatataaaggcaggccag

SEQ ID NO: 473621 - DNA, 34 bp, Homo sapiens; identical to SEQ ID NO: 455599
  chr10:102995986-102996020
  hyper
  pancreas_gallbladder vs. myeloid_neoplasm,thyroid, non_cancer

SEQ ID NO: 473622 - DNA, 21 bp, Homo sapiens
  chr10:103044414-103044435
  hyper
  pancreas_gallbladder vs. myeloid_neoplasm
tcccctctatgggccccgccc

SEQ ID NO: 473623 - DNA, 40 bp, Homo sapiens
  chr10:110671608-110671648
  hyper
  pancreas_gallbladder vs. liver_bileduct
cgcttcagctactccgttaggaggcgggcagttttgtctg

SEQ ID NO: 473624 - DNA, 240 bp, Homo sapiens; identical to SEQ ID NO: 454122
  chr10:118891774-118892014
  hyper
  pancreas_gallbladder vs. multiple_myeloma,thyroid

SEQ ID NO: 473625 - DNA, 20 bp, Homo sapiens
  chr10:119300904-119300924
  hyper
  pancreas_gallbladder vs. bladder_and_urothelial, multiple_myeloma
cgccagcagcctggggatgt

SEQ ID NO: 473626 - DNA, 221 bp, Homo sapiens; identical to SEQ ID NO: 466148
  chr10:128076024-128076245
  hyper
  pancreas_gallbladder vs. bladder_and_urothelial

SEQ ID NO: 473627 - DNA, 89 bp, Homo sapiens; identical to SEQ ID NO: 372587
  chr10:133110981-133111070
  hyper
  pancreas_gallbladder vs. melanoma

SEQ ID NO: 473628 - DNA, 94 bp, Homo sapiens; identical to SEQ ID NO: 466164
  chr11:2290844-2290938
  hyper
  pancreas_gallbladder vs. upper_gi,colorectal,anorectal, head_and_neck

SEQ ID NO: 473629 - DNA, 34 bp, Homo sapiens; identical to SEQ ID NO: 372612
  chr11:2398443-2398477
  hyper
  pancreas_gallbladder vs. liver_bileduct

SEQ ID NO: 473630 - DNA, 565 bp, Homo sapiens; identical to SEQ ID NO: 457353
  chr11:2398759-2399324
  hyper
  pancreas_gallbladder vs. lung,colorectal,head_and_neck

SEQ ID NO: 473631 - DNA, 112 bp, Homo sapiens; identical to SEQ ID NO: 457354
  chr11:2399399-2399511
  hyper
  pancreas_gallbladder vs. lung,colorectal,head_and_neck

SEQ ID NO: 473632 - DNA, 286 bp, Homo sapiens; identical to SEQ ID NO: 457355
  chr11:2399038-2399324
  hyper
  pancreas_gallbladder vs. head_and_neck,lung

SEQ ID NO: 473633 - DNA, 401 bp, Homo sapiens; identical to SEQ ID NO: 351145
  chr11:2399399-2399800
  hyper
  pancreas_gallbladder vs. head_and_neck,lung

SEQ ID NO: 473634 - DNA, 30 bp, Homo sapiens; identical to SEQ ID NO: 466184
  chr11:13030890-13030920
  hyper
  pancreas_gallbladder vs. upper_gi

SEQ ID NO: 473635 - DNA, 77 bp, Homo sapiens; identical to SEQ ID NO: 372675
  chr11:20179003-20179080
  hyper
  pancreas_gallbladder vs. thyroid,head_and_neck

SEQ ID NO: 473636 - DNA, 38 bp, Homo sapiens; identical to SEQ ID NO: 351170
  chr11:20619974-20620012
  hyper
  pancreas_gallbladder vs. melanoma

SEQ ID NO: 473637 - DNA, 56 bp, Homo sapiens; identical to SEQ ID NO: 452790
  chr11:43599961-43600017
  hyper
  pancreas_gallbladder vs. melanoma,bladder_and_urothelial, lung,ovary,uterine,sarcoma

SEQ ID NO: 473638 - DNA, 239 bp, Homo sapiens; identical to SEQ ID NO: 452791
  chr11:43600215-43600454
  hyper
  pancreas_gallbladder vs. melanoma,bladder_and_urothelial, lung,ovary,uterine,sarcoma

SEQ ID NO: 473639 - DNA, 174 bp, Homo sapiens; identical to SEQ ID NO: 452792
  chr11:43600280-43600454
  hyper
  pancreas_gallbladder vs. melanoma,sarcoma,uterine,lung, prostate,ovary,bladder_and_urothelial,myeloid_neoplasm,thyroid, non_cancer,breast

SEQ ID NO: 473640 - DNA, 20 bp, Homo sapiens
  chr11:60718609-60718629
  hyper
  pancreas_gallbladder vs. cervical,thyroid
cggcgacgcgggcatctctc

SEQ ID NO: 473641 - DNA, 237 bp, Homo sapiens
  chr11:61275825-61276062
  hyper
  pancreas_gallbladder vs. colorectal,anorectal, head_and_neck
cggccgcacgccgctggacgtgaatggctcgcagtgaccgcgcccctcagcccctccttgtgagcctctagtccagagtctttgatccaccgccagcgtttccttcgccttcttggacccgcggctctggggcgcacacaaccgcacaccaaacagcgtcgggcgtcgggtctcagtgccaggcttggccggggcggggaatctctcggcttgtgcttgctccgcggtgggctggat

SEQ ID NO: 473642 - DNA, 316 bp, Homo sapiens; identical to SEQ ID NO: 462351
  chr11:61276101-61276417
  hyper
  pancreas_gallbladder vs. colorectal,anorectal, head_and_neck

SEQ ID NO: 473643 - DNA, 316 bp, Homo sapiens; identical to SEQ ID NO: 462351
  chr11:61276101-61276417
  hyper
  pancreas_gallbladder vs. breast,colorectal,head_and_neck, cervical,uterine,lung,prostate,thyroid,ovary,sarcoma, bladder_and_urothelial,myeloid_neoplasm,non_cancer,anorectal

SEQ ID NO: 473644 - DNA, 20 bp, Homo sapiens
  chr11:100999022-100999042
  hyper
  pancreas_gallbladder vs. ovary
gcccccggcgggacagccgc

SEQ ID NO: 473645 - DNA, 1 bp, Homo sapiens
  chr11:100999159-100999160
  hyper
  pancreas_gallbladder vs. ovary
c

SEQ ID NO: 473646 - DNA, 748 bp, Homo sapiens
  chr11:102962175-102962923
  hyper
  pancreas_gallbladder vs. upper_gi,liver_bileduct
cgatacgggagtaggggatcgagggtcggttgtggggtgggggtgggggtggggggaagcgcaatttacatatgcatctgttccccaccctgcagggcacgtagactcttaacgtgggcggctcttctagtctctccataaacgccagcgtgcacacactcgaacacgaggtcgggtcgggcgcggagactcgcggtgttcggcacctacagcctagctcgatcaaaggggcctcacctgtctccagccccagcccggcaggccgggcccgactccttttcctccagttgtccagcaaaggagggaggagggaagcttgaagggtggggggagatggtacctggagattttacactttttgaggcctccgtcttccgctactgctgctgccaccccaggggattttctcttcttcttcaccggcatcttccgccctccccggcagggtgggcaggggagccggggaagggggtccctgtccgctggaagcccctcagcgctggcacccagttcccagagacagcagcaagcggaggagcagagtcgccagcccgcaccggcgcggcccagcccggccgccgcccgctcccaggtatcctcgtcgtctttctctgaccgggacagggctggctcctcgccggtggacactgcggttcgttctcaccgggaggagataacgcggacagcgcggcagctccaccagtcacagcaagcaagaggctcagcctaacccggaggcgaatcgctg

SEQ ID NO: 473647 - DNA, 99 bp, Homo sapiens; identical to SEQ ID NO: 351251
  chr11:102963062-102963161
  hyper
  pancreas_gallbladder vs. upper_gi,liver_bileduct

SEQ ID NO: 473648 - DNA, 131 bp, Homo sapiens; identical to SEQ ID NO: 347179
  chr11:106889091-106889222
  hyper
  pancreas_gallbladder vs. head_and_neck,breast,anorectal, lung,melanoma,prostate,sarcoma,ovary,renal,uterine, myeloid_neoplasm,thyroid

SEQ ID NO: 473649 - DNA, 227 bp, Homo sapiens; identical to SEQ ID NO: 462363
  chr11:106889091-106889318
  hyper
  pancreas_gallbladder vs. head_and_neck,breast,melanoma, anorectal,lung,sarcoma,ovary,prostate

SEQ ID NO: 473650 - DNA, 168 bp, Homo sapiens; identical to SEQ ID NO: 351253
  chr11:107462735-107462903
  hyper
  pancreas_gallbladder vs. lung

SEQ ID NO: 473651 - DNA, 4 bp, Homo sapiens
  chr11:115630408-115630412
  hyper
  pancreas_gallbladder vs. bladder_and_urothelial
cgtc

SEQ ID NO: 473652 - DNA, 240 bp, Homo sapiens
  chr11:124630133-124630373
  hyper
  pancreas_gallbladder vs. cervical
cggaagtcaccaactggtccgtttttttcggtcccagggtccacggagccactgggagagaaaaggagtctggttgggtctgatcgaaggacactgggacagcccaagaaagggacccttccggcccacagccctctccgaggccagagtgagggagccggcaggggccgaaggagagcgaaatgggcccgctccccggggctatttttagtctccctctttctctgagaaactcccccc

SEQ ID NO: 473653 - DNA, 141 bp, Homo sapiens; identical to SEQ ID NO: 372869
  chr11:124630410-124630551
  hyper
  pancreas_gallbladder vs. cervical

SEQ ID NO: 473654 - DNA, 129 bp, Homo sapiens; identical to SEQ ID NO: 459366
  chr11:128562635-128562764
  hyper
  pancreas_gallbladder vs. multiple_myeloma

SEQ ID NO: 473655 - DNA, 18 bp, Homo sapiens
  chr11:128563818-128563836
  hyper
  pancreas_gallbladder vs. multiple_myeloma
gagaggagagctcgaggc

SEQ ID NO: 473656 - DNA, 145 bp, Homo sapiens; identical to SEQ ID NO: 372883
  chr11:132814249-132814394
  hyper

SEQ ID NO: 473657 - DNA, 41 bp, Homo sapiens; identical to SEQ ID NO: 351298
  chr12:3602961-3603002
  hyper
  pancreas_gallbladder vs. breast,ovary,thyroid,sarcoma

SEQ ID NO: 473658 - DNA, 126 bp, Homo sapiens
  chr12:4273746-4273872
  hyper
  pancreas_gallbladder vs. multiple_myeloma,non_cancer, thyroid,renal,myeloid_neoplasm,cervical,prostate,colorectal, anorectal
cgtgagccgtccccttcgctaacccccaaccccgccttctcctgctcctcctctcttcactcttcctgcctctcggctccggggtctcctcgcttccccgcagtccccgccccccagttcccaaag

SEQ ID NO: 473659 - DNA, 86 bp, Homo sapiens; identical to SEQ ID NO: 452813
  chr12:4377809-4377895
  hyper
  pancreas_gallbladder vs. lymphoid_neoplasm,colorectal, ovary,non_cancer,myeloid_neoplasm,melanoma,thyroid

SEQ ID NO: 473660 - DNA, 142 bp, Homo sapiens; identical to SEQ ID NO: 452814
  chr12:4378558-4378700
  hyper
  pancreas_gallbladder vs. lymphoid_neoplasm,colorectal, ovary,non_cancer,myeloid_neoplasm,melanoma,thyroid

SEQ ID NO: 473661 - DNA, 245 bp, Homo sapiens; identical to SEQ ID NO: 452815
  chr12:4378558-4378803
  hyper
  pancreas_gallbladder vs. colorectal,lymphoid_neoplasm, non_cancer,melanoma,myeloid_neoplasm,thyroid,ovary, multiple_myeloma

SEQ ID NO: 473662 - DNA, 88 bp, Homo sapiens; identical to SEQ ID NO: 454142
  chr12:4378715-4378803
  hyper
  pancreas_gallbladder vs. colorectal,melanoma, lymphoid_neoplasm,non_cancer,multiple_myeloma

SEQ ID NO: 473663 - DNA, 247 bp, Homo sapiens; identical to SEQ ID NO: 455641
  chr12:4379920-4380167
  hyper
  pancreas_gallbladder vs. colorectal,anorectal,melanoma

SEQ ID NO: 473664 - DNA, 247 bp, Homo sapiens; identical to SEQ ID NO: 455641
  chr12:4379920-4380167
  hyper
  pancreas_gallbladder vs. colorectal

SEQ ID NO: 473665 - DNA, 285 bp, Homo sapiens; identical to SEQ ID NO: 455642
  chr12:4380196-4380481
  hyper
  pancreas_gallbladder vs. colorectal

SEQ ID NO: 473666 - DNA, 266 bp, Homo sapiens; identical to SEQ ID NO: 455643
  chr12:4380215-4380481
  hyper
  pancreas_gallbladder vs. colorectal

SEQ ID NO: 473667 - DNA, 152 bp, Homo sapiens; identical to SEQ ID NO: 455644
  chr12:4381033-4381185
  hyper
  pancreas_gallbladder vs. colorectal

SEQ ID NO: 473668 - DNA, 401 bp, Homo sapiens; identical to SEQ ID NO: 455645
  chr12:4381033-4381434
  hyper
  pancreas_gallbladder vs. colorectal

SEQ ID NO: 473669 - DNA, 202 bp, Homo sapiens; identical to SEQ ID NO: 454143
  chr12:4381232-4381434
  hyper
  pancreas_gallbladder vs. colorectal,anorectal, head_and_neck,uterine,non_cancer,myeloid_neoplasm,thyroid

SEQ ID NO: 473670 - DNA, 167 bp, Homo sapiens; identical to SEQ ID NO: 347205
  chr12:4382439-4382606
  hyper
  pancreas_gallbladder vs. colorectal,anorectal, head_and_neck,uterine,non_cancer,myeloid_neoplasm,thyroid

SEQ ID NO: 473671 - DNA, 51 bp, Homo sapiens; identical to SEQ ID NO: 454144
  chr12:4382915-4382966
  hyper
  pancreas_gallbladder vs. colorectal,multiple_myeloma, anorectal,melanoma,head_and_neck,non_cancer,myeloid_neoplasm, thyroid

SEQ ID NO: 473672 - DNA, 210 bp, Homo sapiens; identical to SEQ ID NO: 454145
  chr12:4382999-4383209
  hyper
  pancreas_gallbladder vs. colorectal,multiple_myeloma, anorectal,melanoma,head_and_neck,non_cancer,myeloid_neoplasm, thyroid

SEQ ID NO: 473673 - DNA, 155 bp, Homo sapiens; identical to SEQ ID NO: 345415
  chr12:4384059-4384214
  hyper
  pancreas_gallbladder vs. colorectal,anorectal, head_and_neck,multiple_myeloma,non_cancer,myeloid_neoplasm, thyroid

SEQ ID NO: 473674 - DNA, 255 bp, Homo sapiens; identical to SEQ ID NO: 455647
  chr12:4384059-4384314
  hyper
  pancreas_gallbladder vs. colorectal,anorectal, multiple_myeloma

SEQ ID NO: 473675 - DNA, 79 bp, Homo sapiens; identical to SEQ ID NO: 351309
  chr12:4384533-4384612
  hyper
  pancreas_gallbladder vs. colorectal,anorectal, multiple_myeloma

SEQ ID NO: 473676 - DNA, 26 bp, Homo sapiens
  chr12:5541693-5541719
  hyper
  pancreas_gallbladder vs. anorectal
ggccgaagcgcaaccgcagccacccc

SEQ ID NO: 473677 - DNA, 323 bp, Homo sapiens
  chr12:5541693-5542016
  hyper
  pancreas_gallbladder vs. head_and_neck,ovary
ggccgaagcgcaaccgcagccaccccgctacacacacacacacacacacacacacacacacacacacacacacacacacagacacggacacccttctccacctcctcccctcttgtccctcggctgcccaagaagcttccctcaatctgggaaagtgatcaggtttaagggacctggattggaaagggtgggggcagaagaggggaaatggggacgacgaaagagcaggaaagagattcaacagaatcaaccacccaccactcccaaccgacccgcctgctcctccgagaaagctcctagcgcatcctataacaaaagggggt

SEQ ID NO: 473678 - DNA, 239 bp, Homo sapiens
  chr12:5541777-5542016
  hyper
cggacacccttctccacctcctcccctcttgtccctcggctgcccaagaagcttccctcaatctgggaaagtgatcaggtttaagggacctggattggaaagggtgggggcagaagaggggaaatggggacgacgaaagagcaggaaagagattcaacagaatcaaccacccaccactcccaaccgacccgcctgctcctccgagaaagctcctagcgcatcctataacaaaagggggt

SEQ ID NO: 473679 - DNA, 117 bp, Homo sapiens; identical to SEQ ID NO: 347220
  chr12:21681020-21681137
  hyper
  pancreas_gallbladder vs. ovary,renal,breast,uterine, prostate,sarcoma,myeloid_neoplasm,thyroid,non_cancer,lung, bladder_and_urothelial,multiple_myeloma,melanoma,liver_bileduct

SEQ ID NO: 473680 - DNA, 6 bp, Homo sapiens
  chr12:22488262-22488268
  hyper
  pancreas_gallbladder vs. head_and_neck,sarcoma,anorectal, lung,breast,bladder_and_urothelial,ovary,renal,uterine, non_cancer
gcgccc

SEQ ID NO: 473681 - DNA, 118 bp, Homo sapiens; identical to SEQ ID NO: 347221
  chr12:22488705-22488823
  hyper
  pancreas_gallbladder vs. head_and_neck,lung,anorectal, breast,sarcoma,renal,bladder_and_urothelial,prostate,ovary

SEQ ID NO: 473682 - DNA, 253 bp, Homo sapiens; identical to SEQ ID NO: 459373
  chr12:24715505-24715758
  hyper
  pancreas_gallbladder vs. lung,anorectal,multiple_myeloma, sarcoma

SEQ ID NO: 473683 - DNA, 253 bp, Homo sapiens; identical to SEQ ID NO: 459373
  chr12:24715505-24715758
  hyper
  pancreas_gallbladder vs. lung,sarcoma,multiple_myeloma, anorectal,breast

SEQ ID NO: 473684 - DNA, 23 bp, Homo sapiens
  chr12:25102288-25102311
  hyper
  pancreas_gallbladder vs. bladder_and_urothelial, lymphoid_neoplasm,multiple_myeloma
ccgtgtaacatttatatggagac

SEQ ID NO: 473685 - DNA, 144 bp, Homo sapiens
  chr12:29935696-29935840
  hyper
  pancreas_gallbladder vs. cervical
cggctggggccccagggtccctggagaagcctaggctctgcgttacctctctctgcaccttctaaagtctagatccagagaagtctggcagattggagagcctctgggagcagccaagggtgcaaggcgggggctggggggctc

SEQ ID NO: 473686 - DNA, 77 bp, Homo sapiens; identical to SEQ ID NO: 452819
  chr12:40618264-40618341
  hyper
  pancreas_gallbladder vs. liver_bileduct

SEQ ID NO: 473687 - DNA, 35 bp, Homo sapiens; identical to SEQ ID NO: 351336
  chr12:40619048-40619083
  hyper
  pancreas_gallbladder vs. liver_bileduct

SEQ ID NO: 473688 - DNA, 54 bp, Homo sapiens; identical to SEQ ID NO: 459376
  chr12:41086129-41086183
  hyper
  pancreas_gallbladder vs. lung

SEQ ID NO: 473689 - DNA, 211 bp, Homo sapiens; identical to SEQ ID NO: 459377
  chr12:41086454-41086665
  hyper
  pancreas_gallbladder vs. lung

SEQ ID NO: 473690 - DNA, 22 bp, Homo sapiens
  chr12:41086692-41086714
  hyper
  pancreas_gallbladder vs. lung
cgccagcgccgggaactcgccc

SEQ ID NO: 473691 - DNA, 409 bp, Homo sapiens; identical to SEQ ID NO: 457434
  chr12:48577061-48577470
  hyper
  pancreas_gallbladder vs. anorectal,sarcoma

SEQ ID NO: 473692 - DNA, 3 bp, Homo sapiens
  chr12:49363675-49363678
  hyper
  pancreas_gallbladder vs. upper_gi
cgc

SEQ ID NO: 473693 - DNA, 61 bp, Homo sapiens
  chr12:49364178-49364239
  hyper
  pancreas_gallbladder vs. upper_gi
caactctccccaccccgggtcggtgtttctatggcctgggagacaaggggaactgctcacc

SEQ ID NO: 473694 - DNA, 3 bp, Homo sapiens
  chr12:52401537-52401540
  hyper
  pancreas_gallbladder vs. anorectal,melanoma, head_and_neck
tcc

SEQ ID NO: 473695 - DNA, 54 bp, Homo sapiens; identical to SEQ ID NO: 347231
  chr12:52401605-52401659
  hyper
  pancreas_gallbladder vs. anorectal,melanoma, head_and_neck

SEQ ID NO: 473696 - DNA, 182 bp, Homo sapiens; identical to SEQ ID NO: 459384
  chr12:54366668-54366850
  hyper
  pancreas_gallbladder vs. upper_gi

SEQ ID NO: 473697 - DNA, 394 bp, Homo sapiens; identical to SEQ ID NO: 464140
  chr12:54378327-54378721
  hyper
  pancreas_gallbladder vs. upper_gi

SEQ ID NO: 473698 - DNA, 180 bp, Homo sapiens; identical to SEQ ID NO: 462396
  chr12:54378541-54378721
  hyper
  pancreas_gallbladder vs. upper_gi

SEQ ID NO: 473699 - DNA, 104 bp, Homo sapiens; identical to SEQ ID NO: 464141
  chr12:54393256-54393360
  hyper
  pancreas_gallbladder vs. upper_gi

SEQ ID NO: 473700 - DNA, 14 bp, Homo sapiens
  chr12:65220439-65220453
  hyper
  pancreas_gallbladder vs. ovary
cttaatattccttc

SEQ ID NO: 473701 - DNA, 205 bp, Homo sapiens; identical to SEQ ID NO: 457452
  chr12:79257510-79257715
  hyper
  pancreas_gallbladder vs. bladder_and_urothelial

SEQ ID NO: 473702 - DNA, 201 bp, Homo sapiens
  chr12:79258097-79258298
  hyper
  pancreas_gallbladder vs. bladder_and_urothelial
ggcatgctcagtatcagggtaggttttgattgagagtaaaaaaaaaaaaaaaaaagctttgtattatgctctctttctcctgtgcatactgcttgctgaacagcttgtggggcattcctgagtctacctagaggttttatcagacgcccttgattgtgtctccttgggatctgttcccctcttacttcaccccctccccca

SEQ ID NO: 473703 - DNA, 201 bp, Homo sapiens; identical to SEQ ID NO: 473702
  chr12:79258097-79258298
  hyper
  pancreas_gallbladder vs. prostate

SEQ ID NO: 473704 - DNA, 57 bp, Homo sapiens; identical to SEQ ID NO: 457454
  chr12:85305601-85305658
  hyper
  pancreas_gallbladder vs. melanoma

SEQ ID NO: 473705 - DNA, 255 bp, Homo sapiens; identical to SEQ ID NO: 457455
  chr12:85305980-85306235
  hyper
  pancreas_gallbladder vs. melanoma

SEQ ID NO: 473706 - DNA, 265 bp, Homo sapiens; identical to SEQ ID NO: 468722
  chr12:93966037-93966302
  hyper
  pancreas_gallbladder vs. anorectal,colorectal

SEQ ID NO: 473707 - DNA, 66 bp, Homo sapiens; identical to SEQ ID NO: 351396
  chr12:93967274-93967340
  hyper
  pancreas_gallbladder vs. bladder_and_urothelial, anorectal,colorectal

SEQ ID NO: 473708 - DNA, 373 bp, Homo sapiens; identical to SEQ ID NO: 457459
  chr12:94542716-94543089
  hyper
  pancreas_gallbladder vs. sarcoma,prostate,non_cancer, thyroid,melanoma,multiple_myeloma

SEQ ID NO: 473709 - DNA, 31 bp, Homo sapiens; identical to SEQ ID NO: 452825
  chr12:94543992-94544023
  hyper
  pancreas_gallbladder vs. thyroid,non_cancer, multiple_myeloma,sarcoma,melanoma,prostate

SEQ ID NO: 473710 - DNA, 86 bp, Homo sapiens; identical to SEQ ID NO: 345430
  chr12:94544052-94544138
  hyper
  pancreas_gallbladder vs. thyroid,non_cancer, multiple_myeloma,sarcoma,melanoma,prostate

SEQ ID NO: 473711 - DNA, 268 bp, Homo sapiens; identical to SEQ ID NO: 452828
  chr12:103351149-103351417
  hyper
  pancreas_gallbladder vs. thyroid,prostate

SEQ ID NO: 473712 - DNA, 13 bp, Homo sapiens
  chr12:103889148-103889161
  hyper
  pancreas_gallbladder vs. lung
cggggcgtgccct

SEQ ID NO: 473713 - DNA, 58 bp, Homo sapiens; identical to SEQ ID NO: 373138
  chr12:103890025-103890083
  hyper
  pancreas_gallbladder vs. lung

SEQ ID NO: 473714 - DNA, 214 bp, Homo sapiens
  chr12:115106003-115106217
  hyper
  pancreas_gallbladder vs. upper_gi
cgggaggcgctggggtgccgagccagctgcggcgacctggacgcattcgtagacgagacagataggtggcactcgaagcccagaaaaaaggcgaaggcgcctgccctgagtggcctctggggcggccgcagccaccataaagcctgcggcgagattgcgaccggcgccaggtgagtaataggcagcaaaatccagagagactgcgagccgttca

SEQ ID NO: 473715 - DNA, 219 bp, Homo sapiens
  chr12:115106246-115106465
  hyper
  pancreas_gallbladder vs. upper_gi
caggagttactcattaacatcacaatatacaaatgagatacacaggagattaaaaaaaaaaaaaaaaaaaaaagaggaacgccagtaagagaggctggacacaagtctgagcagggtccccaaatcgggggcggggggagagaagggaggaggtaagcaaatttggactgagaaagaagagaaaagcaaagcatttcttcccttttggaggctgagttc

SEQ ID NO: 473716 - DNA, 340 bp, Homo sapiens; identical to SEQ ID NO: 360209
  chr12:115106502-115106842
  hyper
  pancreas_gallbladder vs. upper_gi

SEQ ID NO: 473717 - DNA, 805 bp, Homo sapiens
  chr12:115120701-115121506
  hyper
  pancreas_gallbladder vs. upper_gi,colorectal
cgtcctccacctcttcttcgggctccatggtcttcaaaggcctcagatgcgcctggggccccagggaggagaacgggatgccggtctcggccgcccccaccaattgatccatgatcggcttggccagggcgcccggcagcgagagcgccgccgcgccgttgggaggcagcgtcagcgcggggaagaacggcggctggtgacccagcaccgcgctcatggcgaagtccggcgcccggtgaggtaggaacggatggtaggccatgcttgtcccaggaatgaccggatctctcatggagaggctcatccactccaggcggggcgctgggctccagccggggacaagtccgcagctgctgtgttttgttgtttttttgttgttgtttaacagcagcacataattcaaaaggggggaaaaagcaaaacaaaaaagaaagaaaaaagaaaaggaggcagaaatcacaactaatgcacttcaaagggaggaggggaagtgtcttttggagaatgggaggccgcttttaaagagggcaaggcgaaaaatcagcaaacatagtcgcgcgggtgaccgtccttgtgccttgcgtttttaaaaagccgctcctgaacgtcggtttcagaagcgagaggagcgagcagggtctcgactcgcgcccgagccctgccgctgagctcgaaatagacactccagccctgcgtcccaggaatctctctccagcccctaggtcttttgttgcaaatgtgaaaggttctcctagaagactttttacctttctttttcttcttcccccgccccctatctgtcttc

SEQ ID NO: 473718 - DNA, 23 bp, Homo sapiens
  chr12:115121544-115121567
  hyper
  pancreas_gallbladder vs. upper_gi,colorectal
tagacccggctttaacagggagc

SEQ ID NO: 473719 - DNA, 292 bp, Homo sapiens
  chr12:115121214-115121506
  hyper
  pancreas_gallbladder vs. upper_gi
cgcttttaaagagggcaaggcgaaaaatcagcaaacatagtcgcgcgggtgaccgtccttgtgccttgcgtttttaaaaagccgctcctgaacgtcggtttcagaagcgagaggagcgagcagggtctcgactcgcgcccgagccctgccgctgagctcgaaatagacactccagccctgcgtcccaggaatctctctccagcccctaggtcttttgttgcaaatgtgaaaggttctcctagaagactttttacctttctttttcttcttcccccgccccctatctgtcttc

SEQ ID NO: 473720 - DNA, 342 bp, Homo sapiens
  chr12:115121544-115121886
  hyper
  pancreas_gallbladder vs. upper_gi
tagacccggctttaacagggagcgagagagcggaaaaagtctctctcctttaaaaaaaaaaaaatctgatttaaacccccttctaccagcgctatcaaaacttgaattgcaaactggcttccgttcgccgccctcctcctccttcctctgctccgagcctccggagggtgtctcggtttcaatccaaatcttgctgggctcttctcccgtgcctctctctcttccttgtcctaaaacgtgagcgaattcgcttcctaaatctgtgtccaggcgcgcagggcagggaggatttagagggggaaaaaatggaacagagggaaagagagggaggggagagagaga

SEQ ID NO: 473721 - DNA, 45 bp, Homo sapiens
  chr12:115122015-115122060
  hyper
  pancreas_gallbladder vs. upper_gi
gctgcggggagccggaggcctcttgattggctctttgacgctttc

SEQ ID NO: 473722 - DNA, 312 bp, Homo sapiens
  chr12:115121574-115121886
  hyper
  pancreas_gallbladder vs. upper_gi,colorectal
cggaaaaagtctctctcctttaaaaaaaaaaaaatctgatttaaacccccttctaccagcgctatcaaaacttgaattgcaaactggcttccgttcgccgccctcctcctccttcctctgctccgagcctccggagggtgtctcggtttcaatccaaatcttgctgggctcttctcccgtgcctctctctcttccttgtcctaaaacgtgagcgaattcgcttcctaaatctgtgtccaggcgcgcagggcagggaggatttagagggggaaaaaatggaacagagggaaagagagggaggggagagagaga

SEQ ID NO: 473723 - DNA, 222 bp, Homo sapiens
  chr12:115122015-115122237
  hyper
  pancreas_gallbladder vs. upper_gi,colorectal
gctgcggggagccggaggcctcttgattggctctttgacgctttcggaccaattgtgttgctgcataggcgtggttttcacaggtcgagtgctgggggatagagctgagttataaaaagaaggtgtcggaaactgtaacgtcgcagcgccgcatcggtactactgcctgtcctgtgaatatgtcaacatgatcagagggcgggcgggagccactggggagcg

SEQ ID NO: 473724 - DNA, 43 bp, Homo sapiens; identical to SEQ ID NO: 351420
  chr12:115122524-115122567
  hyper
  pancreas_gallbladder vs. upper_gi,colorectal

SEQ ID NO: 473725 - DNA, 153 bp, Homo sapiens
  chr12:115122084-115122237
  hyper
  pancreas_gallbladder vs. upper_gi,liver_bileduct
cgtggttttcacaggtcgagtgctgggggatagagctgagttataaaaagaaggtgtcggaaactgtaacgtcgcagcgccgcatcggtactactgcctgtcctgtgaatatgtcaacatgatcagagggcgggcgggagccactggggagcg

SEQ ID NO: 473726 - DNA, 420 bp, Homo sapiens; identical to SEQ ID NO: 360213
  chr12:115122524-115122944
  hyper
  pancreas_gallbladder vs. upper_gi,liver_bileduct

SEQ ID NO: 473727 - DNA, 143 bp, Homo sapiens
  chr12:115889561-115889704
  hyper
  pancreas_gallbladder vs. upper_gi
cgtcgtgacagtgccaatagccagcagtctcctgtccgcgtgggttgcgagccccgggcgtggacggagttgggagcggagggcggcaggtgccagcggggcccgcctctccctgcaggcggccccggcaagttcacggccgg

SEQ ID NO: 473728 - DNA, 70 bp, Homo sapiens; identical to SEQ ID NO: 373175
  chr12:115889776-115889846
  hyper
  pancreas_gallbladder vs. upper_gi

SEQ ID NO: 473729 - DNA, 406 bp, Homo sapiens; identical to SEQ ID NO: 460689
  chr12:128750713-128751119
  hyper
  pancreas_gallbladder vs. melanoma

SEQ ID NO: 473730 - DNA, 31 bp, Homo sapiens; identical to SEQ ID NO: 452836
  chr12:131400786-131400817
  hyper
  pancreas_gallbladder vs. lung

SEQ ID NO: 473731 - DNA, 54 bp, Homo sapiens; identical to SEQ ID NO: 351436
  chr12:131400919-131400973
  hyper
  pancreas_gallbladder vs. lung

SEQ ID NO: 473732 - DNA, 3 bp, Homo sapiens
  chr12:133484584-133484587
  hyper
  pancreas_gallbladder vs. breast,ovary, bladder_and_urothelial,prostate
cgc

SEQ ID NO: 473733 - DNA, 168 bp, Homo sapiens; identical to SEQ ID NO: 462415
  chr13:20735265-20735433
  hyper
  pancreas_gallbladder vs. cervical,head_and_neck,upper_gi, uterine

SEQ ID NO: 473734 - DNA, 4 bp, Homo sapiens
  chr13:29067770-29067774
  hyper
  pancreas_gallbladder vs. sarcoma
cgat

SEQ ID NO: 473735 - DNA, 23 bp, Homo sapiens
  chr13:37005451-37005474
  hyper
  pancreas_gallbladder vs. ovary,lung,renal,uterine,breast, bladder_and_urothelial,sarcoma,thyroid,myeloid_neoplasm, prostate,cervical,non_cancer
cgattatttcacctggcttgtca

SEQ ID NO: 473736 - DNA, 133 bp, Homo sapiens; identical to SEQ ID NO: 452846
  chr13:46960952-46961085
  hyper
  pancreas_gallbladder vs. colorectal, bladder_and_urothelial,breast,uterine,lymphoid_neoplasm,lung, myeloid_neoplasm,thyroid,prostate,multiple_myeloma,ovary, non_cancer

SEQ ID NO: 473737 - DNA, 135 bp, Homo sapiens; identical to SEQ ID NO: 345444
  chr13:46961683-46961818
  hyper
  pancreas_gallbladder vs. colorectal, bladder_and_urothelial,breast,uterine,lymphoid_neoplasm,lung, myeloid_neoplasm,thyroid,prostate,multiple_myeloma,ovary, non_cancer

SEQ ID NO: 473738 - DNA, 81 bp, Homo sapiens; identical to SEQ ID NO: 466366
  chr13:53422554-53422635
  hyper
  pancreas_gallbladder vs. melanoma

SEQ ID NO: 473739 - DNA, 232 bp, Homo sapiens; identical to SEQ ID NO: 466367
  chr13:53422885-53423117
  hyper
  pancreas_gallbladder vs. melanoma

SEQ ID NO: 473740 - DNA, 64 bp, Homo sapiens; identical to SEQ ID NO: 351479
  chr13:53423198-53423262
  hyper
  pancreas_gallbladder vs. melanoma

SEQ ID NO: 473741 - DNA, 387 bp, Homo sapiens; identical to SEQ ID NO: 373304
  chr13:95360413-95360800
  hyper
  pancreas_gallbladder vs. renal

SEQ ID NO: 473742 - DNA, 91 bp, Homo sapiens; identical to SEQ ID NO: 360347
  chr13:110960603-110960694
  hyper
  pancreas_gallbladder vs. liver_bileduct,lung

SEQ ID NO: 473743 - DNA, 113 bp, Homo sapiens; identical to SEQ ID NO: 345453
  chr14:21101056-21101169
  hyper
  pancreas_gallbladder vs. upper_gi

SEQ ID NO: 473744 - DNA, 2 bp, Homo sapiens
  chr14:23834171-23834173
  hyper
  pancreas_gallbladder vs. head_and_neck
cg

SEQ ID NO: 473745 - DNA, 78 bp, Homo sapiens; identical to SEQ ID NO: 351523
  chr14:23835314-23835392
  hyper
  pancreas_gallbladder vs. head_and_neck,anorectal

SEQ ID NO: 473746 - DNA, 150 bp, Homo sapiens; identical to SEQ ID NO: 462438
  chr14:36003293-36003443
  hyper
  pancreas_gallbladder vs. prostate,head_and_neck,thyroid, breast

SEQ ID NO: 473747 - DNA, 188 bp, Homo sapiens
  chr14:37130956-37131144
  hyper
  pancreas_gallbladder vs. upper_gi
cgctgtcgctcaccgacccgcaccaatcaccatgcagcttgccctcggacccgccccttttagggcgtgtccccagtgagtgatagacggagccgccctgccctgctcagcccagcccacgttgctgcttagattgaaatgcagaactcaagcctctttcatcggggcacagacttccttttacttct

SEQ ID NO: 473748 - DNA, 492 bp, Homo sapiens
  chr14:37131343-37131835
  hyper
  pancreas_gallbladder vs. upper_gi
ggagcgagcgggcaagggagggagggagggagggagcgcgagggcgcgcgccactaggcgctcacattctctattgactttgctcgtgttcctacaagttgtaggaacacgctaagggtcagcggcgcacagcagttcaatgtgaacgctggctactgggtggctgttgatgccattttctgattttaagagaagggagctgtggcatcagcgagcccctcagcccgagtagcaaaccaagttttgtttcacacgcgcgcacacatgcaaacaaaacaggaaaagaaaagaaaagaaaacaaacaacaacaaataaaacaccctctagcttcccctagactttgtttaactggccgggtctccagaaggaacgctggggatgggatgggtggagagagggagcggctcaaggactttagtgaggagcaggcgagaaggagcacgttcaggcgtcaagaccgatttctccccctgcttcgggagacttttgaa

SEQ ID NO: 473749 - DNA, 55 bp, Homo sapiens; identical to SEQ ID NO: 360402
  chr14:37131888-37131943
  hyper
  pancreas_gallbladder vs. upper_gi

SEQ ID NO: 473750 - DNA, 383 bp, Homo sapiens
  chr14:37131452-37131835
  hyper
  pancreas_gallbladder vs. cervical
cgctaagggtcagcggcgcacagcagttcaatgtgaacgctggctactgggtggctgttgatgccattttctgattttaagagaagggagctgtggcatcagcgagcccctcagcccgagtagcaaaccaagttttgtttcacacgcgcgcacacatgcaaacaaaacaggaaaagaaaagaaaagaaaacaaacaacaacaaataaaacaccctctagcttcccctagactttgtttaactggccgggtctccagaaggaacgctggggatgggatgggtggagagagggagcggctcaaggactttagtgaggagcaggcgagaaggagcacgttcaggcgtcaagaccgatttctccccctgcttcgggagacttttgaa

SEQ ID NO: 473751 - DNA, 175 bp, Homo sapiens
  chr14:37131888-37132063
  hyper
  pancreas_gallbladder vs. cervical
cacggcaggaatgagggagggggtccgattggacagtgacggtttggggccgttcggctatgttcagggaccatatggtttggggacagccccagtagttagtaggggacgggtgcgttcgcccagtccccggatgcgtagggaggcccagtggcaggcagctgtcccaagcagc

SEQ ID NO: 473752 - DNA, 66 bp, Homo sapiens; identical to SEQ ID NO: 471027
  chr14:37131997-37132063
  hyper
  pancreas_gallbladder vs. cervical

SEQ ID NO: 473753 - DNA, 22 bp, Homo sapiens
  chr14:37136618-37136640
  hyper
  pancreas_gallbladder vs. head_and_neck
agttcaaaactctcaaaaaacc

SEQ ID NO: 473754 - DNA, 105 bp, Homo sapiens
  chr14:38057019-38057124
  hyper
  pancreas_gallbladder vs. upper_gi
cggtagcgttggtgggtccgagcgccaccggagctgtacacttgggtcaggaggaaggctttccctcctcgcccctcttcgccccctccctcccctccccgggga

SEQ ID NO: 473755 - DNA, 20 bp, Homo sapiens
  chr14:38057372-38057392
  hyper
  pancreas_gallbladder vs. upper_gi
gcccgggtgtttgtgtgtcc

SEQ ID NO: 473756 - DNA, 300 bp, Homo sapiens
  chr14:38057503-38057803
  hyper
  pancreas_gallbladder vs. upper_gi
gggctcaacaggagatttattcgctaggaagggaaaatgcccaaacaatgaagaactatctgcacttgtcacctcgagacgcttgctgtcctgctctgtccgccttccctggcaaccagctgtcctggccgccaacccgcgcgcgtcctaacgcgcgggtggcaggtcgcatcacccagaggtggcggagtgtgcggtctgagaactgcgagaagcccacaaagcaggggctgggcctgcaggctccccgcggtccagctcccgaggcaggtctccaaagtgcccccgtcccccgcataa

SEQ ID NO: 473757 - DNA, 155 bp, Homo sapiens; identical to SEQ ID NO: 351542
  chr14:38057832-38057987
  hyper
  pancreas_gallbladder vs. upper_gi

SEQ ID NO: 473758 - DNA, 82 bp, Homo sapiens
  chr14:38060563-38060645
  hyper
  pancreas_gallbladder vs. upper_gi
cgggagctaggaagtgtttaggacgggtctggaatacacaccttggtagtacgccggctccagggctgagggctcgatgggg

SEQ ID NO: 473759 - DNA, 14 bp, Homo sapiens
  chr14:38061159-38061173
  hyper
  pancreas_gallbladder vs. upper_gi
cgccgccggccccc

SEQ ID NO: 473760 - DNA, 99 bp, Homo sapiens
  chr14:38061332-38061431
  hyper
  pancreas_gallbladder vs. upper_gi
cggatggagttctgccagcgctgctggttctgccggtaataggggaagaggtccatgatccactggtagatctcgctcagcgtgagcatcttgctgggc

SEQ ID NO: 473761 - DNA, 14 bp, Homo sapiens
  chr14:38061159-38061173
  hyper
  pancreas_gallbladder vs. upper_gi
cgccgccggccccc

SEQ ID NO: 473762 - DNA, 600 bp, Homo sapiens
  chr14:38061332-38061932
  hyper
  pancreas_gallbladder vs. upper_gi
cggatggagttctgccagcgctgctggttctgccggtaataggggaagaggtccatgatccactggtagatctcgctcagcgtgagcatcttgctgggcgcctgctggatggccatggtgatgagcgagatgtacgagtagggcggcttggcgtgcgggtagctgcgcttgaacgtcttggcgtcgccgccgccgcccgcgcggctgcggcccaggttggacggcgcgtacgccatggggctcatgcacgggttcatggcggccgcgtaggggcccaggccattcatggaggccgcctgctgcgcacccatggcgcccatgccgctcgggctcagcgccgtacccatggccgtcacgccggccgcagtcatgctgttcatggcgcccgccgagccccccggcatgccggctactgcgccgggactcaggccggcccctaggcccgggttggcataggacatgttgaaggacgccggggtcatgttgccgctcgtagtcatggtgttcatggtcatgtaggtgttcatggagttcatggagcccaggcctgagttcatgttgctgaccgggacggaggagtaggcctggagtggagacagc

SEQ ID NO: 473763 - DNA, 475 bp, Homo sapiens
  chr14:38061457-38061932
  hyper
  pancreas_gallbladder vs. upper_gi
cgagatgtacgagtagggcggcttggcgtgcgggtagctgcgcttgaacgtcttggcgtcgccgccgccgcccgcgcggctgcggcccaggttggacggcgcgtacgccatggggctcatgcacgggttcatggcggccgcgtaggggcccaggccattcatggaggccgcctgctgcgcacccatggcgcccatgccgctcgggctcagcgccgtacccatggccgtcacgccggccgcagtcatgctgttcatggcgcccgccgagccccccggcatgccggctactgcgccgggactcaggccggcccctaggcccgggttggcataggacatgttgaaggacgccggggtcatgttgccgctcgtagtcatggtgttcatggtcatgtaggtgttcatggagttcatggagcccaggcctgagttcatgttgctgaccgggacggaggagtaggcctggagtggagacagc

SEQ ID NO: 473764 - DNA, 209 bp, Homo sapiens; identical to SEQ ID NO: 351545
  chr14:38062091-38062300
  hyper
  pancreas_gallbladder vs. upper_gi

SEQ ID NO: 473765 - DNA, 243 bp, Homo sapiens
  chr14:42076386-42076629
  hyper
  pancreas_gallbladder vs. melanoma
tcccttgaggatgtgaattgtttagcagctggctgctcccttaggatccttgactttggggagctctggctgtgaacacagcccacccatataatccattttgcacggtccgttatatcagaaaaaaaaagcgcaactggacgggggtggggcagaccaacgaaacctagacagacacacacacactcagaggagagaggaagaattgaaagacttgagaagactttgataacctccctgctg

SEQ ID NO: 473766 - DNA, 215 bp, Homo sapiens
  chr14:51562012-51562227
  hyper
  pancreas_gallbladder vs. renal
atagggcagtcttcgctcgcggctgcaagatctctgaagggggccggcgtgcggaggctaggggaccgggaaggaggagttaggcgggatgattcatcctcgcccggcttacttccgacctccggtgcagtctcccaggagctgggggcgtgagaaacccctccccgcagcgagtgggctgccggagggggctggggcttctcgccagcgtttgc

SEQ ID NO: 473767 - DNA, 167 bp, Homo sapiens; identical to SEQ ID NO: 345459
  chr14:61104864-61105031
  hyper
  pancreas_gallbladder vs. myeloid_neoplasm

SEQ ID NO: 473768 - DNA, 182 bp, Homo sapiens; identical to SEQ ID NO: 462453
  chr14:61113933-61114115
  hyper
  pancreas_gallbladder vs. head_and_neck

SEQ ID NO: 473769 - DNA, 33 bp, Homo sapiens; identical to SEQ ID NO: 347303
  chr14:61114722-61114755
  hyper
  pancreas_gallbladder vs. head_and_neck

SEQ ID NO: 473770 - DNA, 9 bp, Homo sapiens
  chr14:70654358-70654367
  hyper
  pancreas_gallbladder vs. multiple_myeloma,thyroid, non_cancer,sarcoma,renal
cgcgcgcgc

SEQ ID NO: 473771 - DNA, 34 bp, Homo sapiens; identical to SEQ ID NO: 373551
  chr14:101544235-101544269
  hyper
  pancreas_gallbladder vs. bladder_and_urothelial

SEQ ID NO: 473772 - DNA, 323 bp, Homo sapiens; identical to SEQ ID NO: 454191
  chr14:103988832-103989155
  hyper
  pancreas_gallbladder vs. head_and_neck

SEQ ID NO: 473773 - DNA, 124 bp, Homo sapiens; identical to SEQ ID NO: 373565
  chr14:103989597-103989721
  hyper
  pancreas_gallbladder vs. head_and_neck

SEQ ID NO: 473774 - DNA, 37 bp, Homo sapiens; identical to SEQ ID NO: 345464
  chr14:105715538-105715575
  hyper
  pancreas_gallbladder vs. lung,upper_gi,colorectal, bladder_and_urothelial,breast,head_and_neck,ovary,renal, cervical,prostate,anorectal,uterine,multiple_myeloma, liver_bileduct,lymphoid_neoplasm,non_cancer,melanoma,sarcoma

SEQ ID NO: 473775 - DNA, 99 bp, Homo sapiens
  chr15:28341522-28341621
  hyper
  pancreas_gallbladder vs. renal,sarcoma
cgtagccgtgtctcgggagcctggcggtgtccgcaggagcgatgctgtgaccgttgcatttgaagcattccttctagttcccggatcccagggaggggg

SEQ ID NO: 473776 - DNA, 3 bp, Homo sapiens
  chr15:34728787-34728790
  hyper
  pancreas_gallbladder vs. cervical,head_and_neck, anorectal
cgc

SEQ ID NO: 473777 - DNA, 12 bp, Homo sapiens
  chr15:34728813-34728825
  hyper
  pancreas_gallbladder vs. cervical,head_and_neck, anorectal
cgcgtcggcccg

SEQ ID NO: 473778 - DNA, 25 bp, Homo sapiens
  chr15:34729636-34729661
  hyper
  pancreas_gallbladder vs. cervical,head_and_neck, anorectal
ctcgccgcgccgccgtcctcgccgc

SEQ ID NO: 473779 - DNA, 47 bp, Homo sapiens; identical to SEQ ID NO: 462466
  chr15:34729898-34729945
  hyper
  pancreas_gallbladder vs. head_and_neck

SEQ ID NO: 473780 - DNA, 72 bp, Homo sapiens; identical to SEQ ID NO: 351658
  chr15:34730043-34730115
  hyper
  pancreas_gallbladder vs. head_and_neck

SEQ ID NO: 473781 - DNA, 89 bp, Homo sapiens
  chr15:35046519-35046608
  hyper
  pancreas_gallbladder vs. melanoma
cggactggggattggagcgggagactcagtccaggtgtgagaagggactcccgggggccgcccgacggggccccctgaccgccggcttg

SEQ ID NO: 473782 - DNA, 182 bp, Homo sapiens
  chr15:35046689-35046871
  hyper
  pancreas_gallbladder vs. melanoma
cgctgtgcatccggaggcagcagacaaagactgggcagcaccgggcacgttcccgctcctggcccctccccgggccgcacttccagaatgggagtgaattgcctcccaattaaagaagcaattttttaaaaaatcctcgaatccccctttccttttattgtacttaaaagagaagaaatggg

SEQ ID NO: 473783 - DNA, 78 bp, Homo sapiens; identical to SEQ ID NO: 452897
  chr15:48936649-48936727
  hyper
  pancreas_gallbladder vs. sarcoma

SEQ ID NO: 473784 - DNA, 186 bp, Homo sapiens
  chr15:52404388-52404574
  hyper
  pancreas_gallbladder vs. upper_gi
cggctgcccgtcccgccccgtgtcccggtgtccgccgcgtgctcacccagccgccctgagcctgcagccaggcgcggtgctgccccatgagccgcgagctcagcaaggccaccaggcgctggcagtcccgggcgacgtcgccctcctgctcctttagccgcggctggaagccccacttcttccacc

SEQ ID NO: 473785 - DNA, 35 bp, Homo sapiens; identical to SEQ ID NO: 360653
  chr15:60298179-60298214
  hyper
  pancreas_gallbladder vs. melanoma

SEQ ID NO: 473786 - DNA, 41 bp, Homo sapiens; identical to SEQ ID NO: 464232
  chr15:68125183-68125224
  hyper
  pancreas_gallbladder vs. upper_gi

SEQ ID NO: 473787 - DNA, 46 bp, Homo sapiens
  chr15:68126860-68126906
  hyper
  pancreas_gallbladder vs. upper_gi
cgtgactttcgtttttaataataataataataataataaaagatgt

SEQ ID NO: 473788 - DNA, 364 bp, Homo sapiens
  chr15:68127129-68127493
  hyper
  pancreas_gallbladder vs. upper_gi
cttgggcccggaatggaggaggggcattacgtcacggtccttagcgcagcggtcccgggctctttcctcaagagctcgaaggcgccgagggttcatccatgcccatttccacgcctgccacaccggggaagttacctccggggcgctcacagacagggcgccctgccgggaatcccaggttcaaccagaattgtccctttagatggcgcgggcaccgccggcctggcctggcctgggagcgctgcggcagggcggaggtctcagggagtaaggtggtctccgccgggcaggcttggaaaggaaggcgggacttggagagctcggtcacagacggcctcccgtctgccccgccgctacccgaaag

SEQ ID NO: 473789 - DNA, 241 bp, Homo sapiens
  chr15:68127252-68127493
  hyper
  pancreas_gallbladder vs. upper_gi
cggggaagttacctccggggcgctcacagacagggcgccctgccgggaatcccaggttcaaccagaattgtccctttagatggcgcgggcaccgccggcctggcctggcctgggagcgctgcggcagggcggaggtctcagggagtaaggtggtctccgccgggcaggcttggaaaggaaggcgggacttggagagctcggtcacagacggcctcccgtctgccccgccgctacccgaaag

SEQ ID NO: 473790 - DNA, 93 bp, Homo sapiens
  chr15:68128502-68128595
  hyper
  pancreas_gallbladder vs. upper_gi,myeloid_neoplasm, uterine
gcaaatgctccttcccacccttccttcccaactccccccaaagtggaaaagctcctaggcagctggggccctccggaagggacgccccatctg

SEQ ID NO: 473791 - DNA, 53 bp, Homo sapiens
  chr15:68723471-68723524
  hyper
  pancreas_gallbladder vs. anorectal
cggggagcccggtgtgggacggccggggccagggtaccctagggcggagagct

SEQ ID NO: 473792 - DNA, 25 bp, Homo sapiens
  chr15:76639451-76639476
  hyper
  pancreas_gallbladder vs. bladder_and_urothelial
cggccgacacttgcctccgtacccc

SEQ ID NO: 473793 - DNA, 12 bp, Homo sapiens
  chr15:76639743-76639755
  hyper
  pancreas_gallbladder vs. bladder_and_urothelial
ctggacacccgc

SEQ ID NO: 473794 - DNA, 61 bp, Homo sapiens; identical to SEQ ID NO: 457569
  chr15:79383268-79383329
  hyper
  pancreas_gallbladder vs. lung,breast

SEQ ID NO: 473795 - DNA, 61 bp, Homo sapiens; identical to SEQ ID NO: 457569
  chr15:79383268-79383329
  hyper
  pancreas_gallbladder vs. sarcoma,lung,prostate,uterine

SEQ ID NO: 473796 - DNA, 62 bp, Homo sapiens; identical to SEQ ID NO: 351730
  chr15:79384146-79384208
  hyper
  pancreas_gallbladder vs. sarcoma,lung,prostate,uterine

SEQ ID NO: 473797 - DNA, 195 bp, Homo sapiens; identical to SEQ ID NO: 462486
  chr15:82339684-82339879
  hyper
  pancreas_gallbladder vs. ovary,anorectal

SEQ ID NO: 473798 - DNA, 7 bp, Homo sapiens
  chr15:82340207-82340214
  hyper
  pancreas_gallbladder vs. ovary,anorectal
cttcacc

SEQ ID NO: 473799 - DNA, 43 bp, Homo sapiens; identical to SEQ ID NO: 360720
  chr15:83315393-83315436
  hyper
  pancreas_gallbladder vs. anorectal

SEQ ID NO: 473800 - DNA, 60 bp, Homo sapiens; identical to SEQ ID NO: 459443
  chr15:83951722-83951782
  hyper
  pancreas_gallbladder vs. head_and_neck,cervical, bladder_and_urothelial,anorectal,breast,multiple_myeloma

SEQ ID NO: 473801 - DNA, 228 bp, Homo sapiens; identical to SEQ ID NO: 459444
  chr15:83952822-83953050
  hyper
  pancreas_gallbladder vs. head_and_neck,cervical

SEQ ID NO: 473802 - DNA, 228 bp, Homo sapiens; identical to SEQ ID NO: 459444
  chr15:83952822-83953050
  hyper
  pancreas_gallbladder vs. head_and_neck,anorectal

SEQ ID NO: 473803 - DNA, 99 bp, Homo sapiens; identical to SEQ ID NO: 351737
  chr15:88801240-88801339
  hyper
  pancreas_gallbladder vs. breast,multiple_myeloma, prostate,ovary,non_cancer,myeloid_neoplasm

SEQ ID NO: 473804 - DNA, 137 bp, Homo sapiens; identical to SEQ ID NO: 464245
  chr15:89921803-89921940
  hyper
  pancreas_gallbladder vs. cervical

SEQ ID NO: 473805 - DNA, 35 bp, Homo sapiens; identical to SEQ ID NO: 457571
  chr15:89942592-89942627
  hyper
  pancreas_gallbladder vs. anorectal,uterine,breast

SEQ ID NO: 473806 - DNA, 59 bp, Homo sapiens; identical to SEQ ID NO: 360737
  chr15:89943816-89943875
  hyper
  pancreas_gallbladder vs. anorectal, bladder_and_urothelial

SEQ ID NO: 473807 - DNA, 135 bp, Homo sapiens
  chr15:96960242-96960377
  hyper
  pancreas_gallbladder vs. liver_bileduct
cgtactatttgagtggcaggcgacgcctttccccactctcggtatttatgttgcaccgacggcacttaggagagcttagttttagatgcggcattaatcttcacttgttaagagatagtctgtcagcctttacca

SEQ ID NO: 473808 - DNA, 100 bp, Homo sapiens
  chr15:96960409-96960509
  hyper
  pancreas_gallbladder vs. liver_bileduct
cccagcgcgcggccacccccaagctggtcctcgcaaaggcgcgcggagccgcactgccgaggagaggagcccggggttaaactggggcaaggcgagcgag

SEQ ID NO: 473809 - DNA, 289 bp, Homo sapiens; identical to SEQ ID NO: 351751
  chr15:96960826-96961115
  hyper
  pancreas_gallbladder vs. liver_bileduct

SEQ ID NO: 473810 - DNA, 1 bp, Homo sapiens
  chr16:1030271-1030272
  hyper
  pancreas_gallbladder vs. ovary
c

SEQ ID NO: 473811 - DNA, 15 bp, Homo sapiens
  chr16:1202573-1202588
  hyper
  pancreas_gallbladder vs. upper_gi
gcggggaaggggcac

SEQ ID NO: 473812 - DNA, 48 bp, Homo sapiens; identical to SEQ ID NO: 345484
  chr16:2042503-2042551
  hyper
  pancreas_gallbladder vs. anorectal,non_cancer

SEQ ID NO: 473813 - DNA, 305 bp, Homo sapiens; identical to SEQ ID NO: 452909
  chr16:3208795-3209100
  hyper
  pancreas_gallbladder vs. upper_gi

SEQ ID NO: 473814 - DNA, 24 bp, Homo sapiens
  chr16:3209411-3209435
  hyper
  pancreas_gallbladder vs. upper_gi
cgaacttccttccttttttccttc

SEQ ID NO: 473815 - DNA, 18 bp, Homo sapiens
  chr16:3234164-3234182
  hyper
  pancreas_gallbladder vs. thyroid,multiple_myeloma, non_cancer,renal
cgcacccaaagcgagaat

SEQ ID NO: 473816 - DNA, 50 bp, Homo sapiens; identical to SEQ ID NO: 452914
  chr16:3238043-3238093
  hyper
  pancreas_gallbladder vs. multiple_myeloma,uterine, thyroid,non_cancer,renal,melanoma

SEQ ID NO: 473817 - DNA, 10 bp, Homo sapiens
  chr16:23846783-23846793
  hyper
  pancreas_gallbladder vs. thyroid,myeloid_neoplasm, non_cancer,melanoma,bladder_and_urothelial,multiple_myeloma, prostate,cervical,lymphoid_neoplasm
cgctcctccc

SEQ ID NO: 473818 - DNA, 1 bp, Homo sapiens
  chr16:24266904-24266905
  hyper
  pancreas_gallbladder vs. melanoma
c

SEQ ID NO: 473819 - DNA, 21 bp, Homo sapiens
  chr16:24267594-24267615
  hyper
  pancreas_gallbladder vs. melanoma
gccctcacccccagcacacgc

SEQ ID NO: 473820 - DNA, 305 bp, Homo sapiens; identical to SEQ ID NO: 462510
  chr16:47176468-47176773
  hyper
  pancreas_gallbladder vs. cervical,head_and_neck,lung

SEQ ID NO: 473821 - DNA, 1 bp, Homo sapiens
  chr16:47177759-47177760
  hyper
  pancreas_gallbladder vs. head_and_neck,cervical, bladder_and_urothelial,anorectal
c

SEQ ID NO: 473822 - DNA, 77 bp, Homo sapiens
  chr16:51184601-51184678
  hyper
  pancreas_gallbladder vs. liver_bileduct
cgaagtaaacttccttaccgctggcagcaaggccgggcggcggaggccgggccgggtgccctggggccggcgccggg

SEQ ID NO: 473823 - DNA, 3 bp, Homo sapiens
  chr16:51187550-51187553
  hyper
  pancreas_gallbladder vs. liver_bileduct,renal
tgc

SEQ ID NO: 473824 - DNA, 281 bp, Homo sapiens
  chr16:54965796-54966077
  hyper
  pancreas_gallbladder vs. breast
cgtaatcctatcttcgcaatccgatttgggagtattaaatttctgaaaagtcggtcgagctgcggtgcatccgggatttttcggccgggttgtaacttcggtctggggtagtatttttggagggtgggagtgcgtgggcatggctcagctttttgtttgcatttcttagctgttgaaaaaagaaaaaaagagccttgacttcccttgttttccccccttgcgcccaacgtgcgtccgctcccccgccgagcgcggagtcgcctcagttgcccaggcctcta

SEQ ID NO: 473825 - DNA, 107 bp, Homo sapiens; identical to SEQ ID NO: 454210
  chr16:54966659-54966766
  hyper
  pancreas_gallbladder vs. breast,cervical

SEQ ID NO: 473826 - DNA, 107 bp, Homo sapiens; identical to SEQ ID NO: 454210
  chr16:54966659-54966766
  hyper
  pancreas_gallbladder vs. anorectal,cervical,breast, upper_gi

SEQ ID NO: 473827 - DNA, 8 bp, Homo sapiens
  chr16:54967414-54967422
  hyper
  pancreas_gallbladder vs. anorectal,cervical,breast, upper_gi
cgtgtccc

SEQ ID NO: 473828 - DNA, 114 bp, Homo sapiens; identical to SEQ ID NO: 351805
  chr16:55359125-55359239
  hyper
  pancreas_gallbladder vs. lung,melanoma,head_and_neck

SEQ ID NO: 473829 - DNA, 61 bp, Homo sapiens
  chr16:56225663-56225724
  hyper
  pancreas_gallbladder vs. anorectal,head_and_neck
gccgccgccgccgcctcctccacctcctcctccgccgccgccgcctcctcctcctccggca

SEQ ID NO: 473830 - DNA, 61 bp, Homo sapiens; identical to SEQ ID NO: 473829
  chr16:56225663-56225724
  hyper
  pancreas_gallbladder vs. anorectal,head_and_neck,breast

SEQ ID NO: 473831 - DNA, 269 bp, Homo sapiens
  chr16:56225881-56226150
  hyper
  pancreas_gallbladder vs. anorectal,head_and_neck,breast
ctccggagccccagaccccggccaccctcgattcgacaaccccagacccctgccagctgccgcgagtctccgctgctggaatcttgttagcggctgtctttttggagggttctggtttcccgacatttttgtttccagcccaggagaggatatcgtgattttccccccttgagcccaggctctgctctctgggggggtggggggcgctccaagccggggagccgtgccagccgagtcgtgcgggctgtggcagggaaggggccaccatg

SEQ ID NO: 473832 - DNA, 86 bp, Homo sapiens; identical to SEQ ID NO: 459452
  chr16:56228284-56228370
  hyper
  pancreas_gallbladder vs. ovary,breast,uterine

SEQ ID NO: 473833 - DNA, 57 bp, Homo sapiens; identical to SEQ ID NO: 351808
  chr16:56228591-56228648
  hyper
  pancreas_gallbladder vs. ovary,breast,uterine

SEQ ID NO: 473834 - DNA, 61 bp, Homo sapiens; identical to SEQ ID NO: 455739
  chr16:56709754-56709815
  hyper
  pancreas_gallbladder vs. upper_gi,multiple_myeloma

SEQ ID NO: 473835 - DNA, 300 bp, Homo sapiens; identical to SEQ ID NO: 459457
  chr16:67197294-67197594
  hyper
  pancreas_gallbladder vs. anorectal,cervical

SEQ ID NO: 473836 - DNA, 3 bp, Homo sapiens
  chr16:68118222-68118225
  hyper
  pancreas_gallbladder vs. upper_gi,cervical,anorectal, liver_bileduct,lung,colorectal,uterine,non_cancer, lymphoid_neoplasm,head_and_neck,multiple_myeloma, bladder_and_urothelial
cgt

SEQ ID NO: 473837 - DNA, 134 bp, Homo sapiens; identical to SEQ ID NO: 345495
  chr16:68118915-68119049
  hyper
  pancreas_gallbladder vs. upper_gi,cervical,anorectal, liver_bileduct,lung,colorectal,uterine,non_cancer, lymphoid_neoplasm,head_and_neck,multiple_myeloma, bladder_and_urothelial

SEQ ID NO: 473838 - DNA, 2 bp, Homo sapiens
  chr16:77245974-77245976
  hyper
  pancreas_gallbladder vs. head_and_neck,lung,cervical, ovary
cg

SEQ ID NO: 473839 - DNA, 82 bp, Homo sapiens; identical to SEQ ID NO: 204296
  chr16:77246930-77247012
  hyper
  pancreas_gallbladder vs. cervical,lung,head_and_neck

SEQ ID NO: 473840 - DNA, 205 bp, Homo sapiens; identical to SEQ ID NO: 457590
  chr16:77247511-77247716
  hyper
  pancreas_gallbladder vs. upper_gi,colorectal

SEQ ID NO: 473841 - DNA, 81 bp, Homo sapiens; identical to SEQ ID NO: 360874
  chr16:77469120-77469201
  hyper
  pancreas_gallbladder vs. breast,prostate

SEQ ID NO: 473842 - DNA, 49 bp, Homo sapiens; identical to SEQ ID NO: 452920
  chr16:77822069-77822118
  hyper
  pancreas_gallbladder vs. sarcoma,renal,lung,ovary, multiple_myeloma,thyroid,prostate,breast

SEQ ID NO: 473843 - DNA, 68 bp, Homo sapiens; identical to SEQ ID NO: 457592
  chr16:80574541-80574609
  hyper
  pancreas_gallbladder vs. liver_bileduct, bladder_and_urothelial

SEQ ID NO: 473844 - DNA, 72 bp, Homo sapiens; identical to SEQ ID NO: 345499
  chr16:80575052-80575124
  hyper
  pancreas_gallbladder vs. liver_bileduct, bladder_and_urothelial

SEQ ID NO: 473845 - DNA, 276 bp, Homo sapiens
  chr16:82660904-82661180
  hyper
taggcaccccccacacacaggctcccactctggcgtgcgtgtgtgtgtgtgtgtgtgtgtgtgtgtgtgtgtgtgtgtgtgtacgttcgttaacgggaggaggagagagctcccagtccttttttgctagcaggggcgacattctcgcccacatcaagtggggtaactttggttccctcctccggaggctcggtgcattggagaaagactcagttagaggcgactccaacgagccgcggttttccccagcccaacgcccagcggccgaagcgctgc

SEQ ID NO: 473846 - DNA, 17 bp, Homo sapiens
  chr16:82661795-82661812
  hyper
tcgcctctctggcaggc

SEQ ID NO: 473847 - DNA, 60 bp, Homo sapiens; identical to SEQ ID NO: 462521
  chr16:87635912-87635972
  hyper
  pancreas_gallbladder vs. melanoma

SEQ ID NO: 473848 - DNA, 190 bp, Homo sapiens; identical to SEQ ID NO: 462522
  chr16:87636008-87636198
  hyper
  pancreas_gallbladder vs. melanoma

SEQ ID NO: 473849 - DNA, 83 bp, Homo sapiens; identical to SEQ ID NO: 360908
  chr16:87637320-87637403
  hyper
  pancreas_gallbladder vs. melanoma

SEQ ID NO: 473850 - DNA, 491 bp, Homo sapiens; identical to SEQ ID NO: 127736
  chr16:87902835-87903326
  hyper
  pancreas_gallbladder vs. upper_gi

SEQ ID NO: 473851 - DNA, 400 bp, Homo sapiens; identical to SEQ ID NO: 462524
  chr16:89006909-89007309
  hyper
  pancreas_gallbladder vs. sarcoma,breast

SEQ ID NO: 473852 - DNA, 92 bp, Homo sapiens; identical to SEQ ID NO: 462526
  chr16:89007789-89007881
  hyper
  pancreas_gallbladder vs. melanoma,breast

SEQ ID NO: 473853 - DNA, 374 bp, Homo sapiens; identical to SEQ ID NO: 462529
  chr16:89007995-89008369
  hyper
  pancreas_gallbladder vs. melanoma,breast

SEQ ID NO: 473854 - DNA, 7 bp, Homo sapiens
  chr16:89008592-89008599
  hyper
  pancreas_gallbladder vs. melanoma,breast
cccgccc

SEQ ID NO: 473855 - DNA, 74 bp, Homo sapiens; identical to SEQ ID NO: 459463
  chr17:28088056-28088130
  hyper
  pancreas_gallbladder vs. upper_gi

SEQ ID NO: 473856 - DNA, 308 bp, Homo sapiens; identical to SEQ ID NO: 459466
  chr17:33700165-33700473
  hyper
  pancreas_gallbladder vs. upper_gi,head_and_neck,cervical, anorectal

SEQ ID NO: 473857 - DNA, 85 bp, Homo sapiens; identical to SEQ ID NO: 459467
  chr17:33701376-33701461
  hyper
  pancreas_gallbladder vs. upper_gi,cervical

SEQ ID NO: 473858 - DNA, 207 bp, Homo sapiens; identical to SEQ ID NO: 459468
  chr17:33701376-33701583
  hyper
  pancreas_gallbladder vs. upper_gi

SEQ ID NO: 473859 - DNA, 168 bp, Homo sapiens; identical to SEQ ID NO: 345516
  chr17:33701612-33701780
  hyper
  pancreas_gallbladder vs. upper_gi

SEQ ID NO: 473860 - DNA, 122 bp, Homo sapiens; identical to SEQ ID NO: 351920
  chr17:35078956-35079078
  hyper
  pancreas_gallbladder vs. lung

SEQ ID NO: 473861 - DNA, 27 bp, Homo sapiens
  chr17:40427488-40427515
  hyper
  pancreas_gallbladder vs. upper_gi
gtgagttctttcctctttgttcacccc

SEQ ID NO: 473862 - DNA, 122 bp, Homo sapiens; identical to SEQ ID NO: 462557
  chr17:42906461-42906583
  hyper
  pancreas_gallbladder vs. head_and_neck

SEQ ID NO: 473863 - DNA, 260 bp, Homo sapiens; identical to SEQ ID NO: 345530
  chr17:46621458-46621718
  hyper

SEQ ID NO: 473864 - DNA, 182 bp, Homo sapiens; identical to SEQ ID NO: 455779
  chr17:46659093-46659275
  hyper
  pancreas_gallbladder vs. bladder_and_urothelial,cervical

SEQ ID NO: 473865 - DNA, 46 bp, Homo sapiens; identical to SEQ ID NO: 455780
  chr17:46659384-46659430
  hyper
  pancreas_gallbladder vs. bladder_and_urothelial,cervical

SEQ ID NO: 473866 - DNA, 64 bp, Homo sapiens; identical to SEQ ID NO: 460782
  chr17:46687527-46687591
  hyper
  pancreas_gallbladder vs. upper_gi,colorectal

SEQ ID NO: 473867 - DNA, 13 bp, Homo sapiens
  chr17:46688806-46688819
  hyper
  pancreas_gallbladder vs. upper_gi,colorectal
gggaagttggtcc

SEQ ID NO: 473868 - DNA, 321 bp, Homo sapiens; identical to SEQ ID NO: 351971
  chr17:46688806-46689127
  hyper
  pancreas_gallbladder vs. upper_gi,colorectal

SEQ ID NO: 473869 - DNA, 149 bp, Homo sapiens; identical to SEQ ID NO: 347451
  chr17:46690905-46691054
  hyper
  pancreas_gallbladder vs. bladder_and_urothelial,cervical, colorectal,upper_gi,ovary,anorectal

SEQ ID NO: 473870 - DNA, 16 bp, Homo sapiens
  chr17:46692424-46692440
  hyper
  pancreas_gallbladder vs. cervical,uterine
agaagggatgccagtt

SEQ ID NO: 473871 - DNA, 349 bp, Homo sapiens
  chr17:47073560-47073909
  hyper
  pancreas_gallbladder vs. anorectal,colorectal
aggaacggcgggaggaggaggggagtggccgccgccccctcccctaagctcccgcccctcgcttccccgtgcgcggagcggaaattaccccctccccccgcgggtctgacctggggacgtgggcggggcttcccgcttagccccccgccctccgtccctctcccgccttcccgccaggatcggaatcctgcaccccaaacaaagttccgagacccgaacctagggcctagagagctgccagcagtgtcccgggtggtgcaggctctggaaactccacctgtctgtccccgactctgggagggaaaaggggaccattcaaatctccacccggtcactccctccctaagac

SEQ ID NO: 473872 - DNA, 153 bp, Homo sapiens
  chr17:47074409-47074562
  hyper
  pancreas_gallbladder vs. colorectal
atgaaaaataaccgtacattttaccctttaagacatgtgagatctgggctggaccatcctcccccagtttgggctggggtagggggatgggtgggggcggggcgcttccctaggggccaggttcttgcaaagggggaaggggcctgtagagct

SEQ ID NO: 473873 - DNA, 216 bp, Homo sapiens; identical to SEQ ID NO: 457619
  chr17:56327007-56327223
  hyper
  pancreas_gallbladder vs. bladder_and_urothelial,lung, anorectal,prostate

SEQ ID NO: 473874 - DNA, 15 bp, Homo sapiens
  chr17:59532358-59532373
  hyper
  pancreas_gallbladder vs. myeloid_neoplasm
actcctaggtttccg

SEQ ID NO: 473875 - DNA, 132 bp, Homo sapiens; identical to SEQ ID NO: 455793
  chr17:59532387-59532519
  hyper
  pancreas_gallbladder vs. myeloid_neoplasm

SEQ ID NO: 473876 - DNA, 1 bp, Homo sapiens
  chr17:59532591-59532592
  hyper
  pancreas_gallbladder vs. myeloid_neoplasm
c

SEQ ID NO: 473877 - DNA, 112 bp, Homo sapiens; identical to SEQ ID NO: 454237
  chr17:61777761-61777873
  hyper
  pancreas_gallbladder vs. cervical,anorectal, lymphoid_neoplasm,multiple_myeloma,non_cancer,sarcoma

SEQ ID NO: 473878 - DNA, 76 bp, Homo sapiens; identical to SEQ ID NO: 345537
  chr17:61778423-61778499
  hyper
  pancreas_gallbladder vs. cervical,anorectal, lymphoid_neoplasm,multiple_myeloma,non_cancer,sarcoma

SEQ ID NO: 473879 - DNA, 81 bp, Homo sapiens; identical to SEQ ID NO: 454240
  chr17:73584287-73584368
  hyper
  pancreas_gallbladder vs. cervical

SEQ ID NO: 473880 - DNA, 170 bp, Homo sapiens; identical to SEQ ID NO: 352021
  chr17:73584951-73585121
  hyper
  pancreas_gallbladder vs. cervical

SEQ ID NO: 473881 - DNA, 104 bp, Homo sapiens; identical to SEQ ID NO: 335678
  chr17:74072105-74072209
  hyper
  pancreas_gallbladder vs. upper_gi

SEQ ID NO: 473882 - DNA, 238 bp, Homo sapiens; identical to SEQ ID NO: 345538
  chr18:2848166-2848404
  hyper
  pancreas_gallbladder vs. uterine,prostate

SEQ ID NO: 473883 - DNA, 47 bp, Homo sapiens
  chr18:4454645-4454692
  hyper
  pancreas_gallbladder vs. liver_bileduct
gacatgaccgggacaggggaccggtgttctcctcccctcccccttcc

SEQ ID NO: 473884 - DNA, 255 bp, Homo sapiens
  chr18:4454777-4455032
  hyper
  pancreas_gallbladder vs. liver_bileduct
cgcccccgagatcccaggttacccggagggcccgggagtgcaccccgggcggctgaaagggtaaggagcgcggactctcgagccagcggccgggggagcccagcccgcagcccctccgcgggcgagggaagcggcgaccgcgcggcaggcagcagccaggagccacccagcgcgccgcgaccgccgccgccgcgcacgccccagccccgcggcgcagcccggcgttacctggccgcgtcccgcagtccggccctc

SEQ ID NO: 473885 - DNA, 273 bp, Homo sapiens; identical to SEQ ID NO: 459494
  chr18:7567478-7567751
  hyper
  pancreas_gallbladder vs. liver_bileduct

SEQ ID NO: 473886 - DNA, 70 bp, Homo sapiens; identical to SEQ ID NO: 352058
  chr18:7568821-7568891
  hyper
  pancreas_gallbladder vs. liver_bileduct

SEQ ID NO: 473887 - DNA, 122 bp, Homo sapiens; identical to SEQ ID NO: 462589
  chr18:24130266-24130388
  hyper
  pancreas_gallbladder vs. cervical,anorectal, head_and_neck,bladder_and_urothelial,uterine,thyroid, myeloid_neoplasm,ovary

SEQ ID NO: 473888 - DNA, 456 bp, Homo sapiens
  chr18:25756040-25756496
  hyper
  pancreas_gallbladder vs. liver_bileduct
ccggactggagcaggtgcttcctgccgcggaggagcctcttagtagagattaaatgaaaaggctcgctggctctctcccgagggtatgaaaagtacggaaggctccaggcaaaggcgcccccggggcgcatatagggcacaggcagccggacagagaaaggagcagccgcgtaacggaacttctcgcccgggggagatactaggcgtgagaggccagactcgttctacaggcaggcgctgaccggcagagactcctccgggcaagagggccagattttctttccaggtgggacgaacacagaatattgtgagggcaagagaagaagaaaaggaggcaactccagactgggataaagacaataggacagtagagcccttgagcaccgggaggcgcacgggtgcagggtggggtaaggtggaggcaagtcccgtaactaagacaccagagtgagaatt

SEQ ID NO: 473889 - DNA, 8 bp, Homo sapiens
  chr18:28621176-28621184
  hyper
  pancreas_gallbladder vs. cervical
atcccttc

SEQ ID NO: 473890 - DNA, 80 bp, Homo sapiens; identical to SEQ ID NO: 452959
  chr18:44335955-44336035
  hyper
  pancreas_gallbladder vs. sarcoma,myeloid_neoplasm, non_cancer,thyroid

SEQ ID NO: 473891 - DNA, 14 bp, Homo sapiens
  chr18:44337138-44337152
  hyper
  pancreas_gallbladder vs. myeloid_neoplasm,thyroid, non_cancer,sarcoma,renal,prostate,breast,bladder_and_urothelial, ovary
caggggctgggcgc

SEQ ID NO: 473892 - DNA, 70 bp, Homo sapiens
  chr18:52988851-52988921
  hyper
  pancreas_gallbladder vs. prostate
cgacaataaaacttgtcaaaaatccccctcgcagcccgcattcgcttaccgctttcccattatagtagta

SEQ ID NO: 473893 - DNA, 139 bp, Homo sapiens
  chr18:52989603-52989742
  hyper
cgcagctgcctgagaactcgactcggagaaaggggagggaaaggggagggaagaaaaaaaaaaaaaaaaaaaaaaaaacaccacgtctctgacctcgctcaaaaggagagagggggcagtgttttctgactgcttggtc

SEQ ID NO: 473894 - DNA, 1 bp, Homo sapiens
  chr18:52989953-52989954
  hyper
c

SEQ ID NO: 473895 - DNA, 448 bp, Homo sapiens; identical to SEQ ID NO: 361288
  chr18:53256017-53256465
  hyper
  pancreas_gallbladder vs. head_and_neck

SEQ ID NO: 473896 - DNA, 53 bp, Homo sapiens; identical to SEQ ID NO: 352104
  chr18:53257322-53257375
  hyper
  pancreas_gallbladder vs. cervical

SEQ ID NO: 473897 - DNA, 45 bp, Homo sapiens; identical to SEQ ID NO: 455808
  chr18:53446783-53446828
  hyper
  pancreas_gallbladder vs. head_and_neck,anorectal

SEQ ID NO: 473898 - DNA, 101 bp, Homo sapiens; identical to SEQ ID NO: 454266
  chr18:60985398-60985499
  hyper
  pancreas_gallbladder vs. melanoma,anorectal,colorectal, renal,ovary,breast,multiple_myeloma,head_and_neck

SEQ ID NO: 473899 - DNA, 75 bp, Homo sapiens; identical to SEQ ID NO: 347516
  chr18:60985973-60986048
  hyper
  pancreas_gallbladder vs. melanoma,anorectal,colorectal, renal,ovary,breast,multiple_myeloma,head_and_neck

SEQ ID NO: 473900 - DNA, 122 bp, Homo sapiens; identical to SEQ ID NO: 335849
  chr18:74163260-74163382
  hyper
  pancreas_gallbladder vs. upper_gi

SEQ ID NO: 473901 - DNA, 121 bp, Homo sapiens; identical to SEQ ID NO: 459501
  chr19:1449921-1450042
  hyper
  pancreas_gallbladder vs. uterine

SEQ ID NO: 473902 - DNA, 218 bp, Homo sapiens
  chr19:1751192-1751410
  hyper
  pancreas_gallbladder vs. colorectal,lung, bladder_and_urothelial,breast,cervical,anorectal,head_and_neck, sarcoma
cggagtccctgaccctcgtcttctctttcaaaatggatgctttccctgctagaaaagccacacacgcttgctattaaaatgaacacgatcatcaagctgtaaaaaatatatttaaaaggaagcctgcaaaatcccagctccctaggagctcccccacattggcatttgggggaacttccttccaccttgttatcctcccacccgtagagacccccagc

SEQ ID NO: 473903 - DNA, 112 bp, Homo sapiens; identical to SEQ ID NO: 352142
  chr19:1751497-1751609
  hyper
  pancreas_gallbladder vs. colorectal,lung, bladder_and_urothelial,breast,cervical,anorectal,head_and_neck, sarcoma

SEQ ID NO: 473904 - DNA, 75 bp, Homo sapiens
  chr19:1761779-1761854
  hyper
  pancreas_gallbladder vs. bladder_and_urothelial,sarcoma, cervical,breast,prostate,multiple_myeloma,melanoma,lung,renal, thyroid,ovary,myeloid_neoplasm,anorectal,uterine,head_and_neck
cggcctcagttttccctctgccaagtaggtgctaatgtgagaggggctgagaaaccggcacccctcctgagtccc

SEQ ID NO: 473905 - DNA, 190 bp, Homo sapiens
  chr19:1761983-1762173
  hyper
  pancreas_gallbladder vs. bladder_and_urothelial,sarcoma, cervical,breast,prostate,multiple_myeloma,melanoma,lung,renal, thyroid,ovary,myeloid_neoplasm,anorectal,uterine,head_and_neck
cgtgcccgggtcacaagtgtagacgcacccggagacacgtgtgtagacgcctccgttcacactgggacgagtgcagactgacccaggacccccatccgccctctggcagtcttgagccagcaactcccctaagtggggtgcggggacatctggaagacgccccatctccccctggacgcagtggctgcgc

SEQ ID NO: 473906 - DNA, 94 bp, Homo sapiens
  chr19:1762079-1762173
  hyper
  pancreas_gallbladder vs. bladder_and_urothelial,sarcoma, melanoma,prostate,breast,renal,lung,myeloid_neoplasm,thyroid, multiple_myeloma,ovary,uterine,non_cancer,head_and_neck, liver_bileduct,cervical
cgccctctggcagtcttgagccagcaactcccctaagtggggtgcggggacatctggaagacgccccatctccccctggacgcagtggctgcgc

SEQ ID NO: 473907 - DNA, 47 bp, Homo sapiens; identical to SEQ ID NO: 345558
  chr19:1762820-1762867
  hyper
  pancreas_gallbladder vs. bladder_and_urothelial,sarcoma, melanoma,prostate,breast,renal,lung,myeloid_neoplasm,thyroid, multiple_myeloma,ovary,uterine,non_cancer,head_and_neck, liver_bileduct,cervical

SEQ ID NO: 473908 - DNA, 109 bp, Homo sapiens
  chr19:1765525-1765634
  hyper
  pancreas_gallbladder vs. bladder_and_urothelial
cgccgcttcacgctgtcctgtgactgtgagtggaggccagctcctggagctgcctctctctggcctcacgcagcagctgctccctgaatggtgaatggatgagtcggtt

SEQ ID NO: 473909 - DNA, 339 bp, Homo sapiens; identical to SEQ ID NO: 352148
  chr19:1766024-1766363
  hyper
  pancreas_gallbladder vs. bladder_and_urothelial

SEQ ID NO: 473910 - DNA, 98 bp, Homo sapiens; identical to SEQ ID NO: 361364
  chr19:1768372-1768470
  hyper
  pancreas_gallbladder vs. liver_bileduct

SEQ ID NO: 473911 - DNA, 69 bp, Homo sapiens
  chr19:1769669-1769738
  hyper
  pancreas_gallbladder vs. bladder_and_urothelial,melanoma, prostate,renal,breast,multiple_myeloma,uterine,colorectal, myeloid_neoplasm
cggcccccctactccaactcacacctctgtcagcggctgtgggggatgggagcaatgacaaagctgctc

SEQ ID NO: 473912 - DNA, 307 bp, Homo sapiens
  chr19:1775741-1776048
  hyper
  pancreas_gallbladder vs. bladder_and_urothelial,breast, multiple_myeloma,renal,sarcoma
cgcccagagggcctcgagaaaaaccagggctcactgtgttgtcccctaaagcgggtcaagaagcacatactagaaatataaaccgggtatttaaaaatggaattttaaagaataacccctcctccgtcagatcccctgccccaccgagggaggtagtagaaaacttccttcctccccacccgccccggccccctccccagggacctcagccctttccaaagtcgccaaaaacccacatcaagccggatccttacggtcccccaccctctccaaaaccaaccccacccgctggcaggacggcccctgc

SEQ ID NO: 473913 - DNA, 224 bp, Homo sapiens
  chr19:1776743-1776967
  hyper
  pancreas_gallbladder vs. renal,bladder_and_urothelial, breast,multiple_myeloma,prostate,ovary
cctcctccctgaaatccccccactcatcggctgcctcccagggaggaggcggcccccctaccccccttgaaaatgcaaaagacatttctagtgaaatgcccctcccctcccccaggtaaaggctacctcactcaagctcatgtctgtgattggaaaatcacgcctgataccaaagatttctcccaaggatttgtgctggatgacaggattccctggcctgggac

SEQ ID NO: 473914 - DNA, 47 bp, Homo sapiens; identical to SEQ ID NO: 459506
  chr19:3785511-3785558
  hyper
  pancreas_gallbladder vs. myeloid_neoplasm,thyroid, prostate,ovary

SEQ ID NO: 473915 - DNA, 30 bp, Homo sapiens
  chr19:4053805-4053835
  hyper
  pancreas_gallbladder vs. lung
cgtgcatgtgtctgtgcgtgtacgtgtctg

SEQ ID NO: 473916 - DNA, 266 bp, Homo sapiens
  chr19:4054040-4054306
  hyper
  pancreas_gallbladder vs. lung
agcttgccggcgccctggatgaccttctcgcagatggggcacttctggaaggccttggctcggatcttcttctccaccttctgcgaccaggccgggtagacgtcgccgtcgtgggcgccgctgaagtacttcaggtagtagtccatgacgcccttgtcgtcggcccgcgactcctcgtcgctgtcccccgccgcggcccccgcccggcccaccgatgacatcatctgctgcagcagcgtgctggccgccagcccgtccacgtcggg

SEQ ID NO: 473917 - DNA, 56 bp, Homo sapiens
  chr19:4054380-4054436
  hyper
  pancreas_gallbladder vs. lung
acagcgaggcggcctcctcctctccgccgcggccgtagtggccgttctgcgtggcg

SEQ ID NO: 473918 - DNA, 150 bp, Homo sapiens
  chr19:4054471-4054621
  hyper
  pancreas_gallbladder vs. lung
ggtgggggcgtcctcatcccgctctggccacagacccgggttgctgtcgccctcgtccccgtcccccgtcgggggccgctcggccggggggcccggcccatagaagtctaagccgttgcagtcgcccgcggccacggcggccacagcggc

SEQ ID NO: 473919 - DNA, 183 bp, Homo sapiens
  chr19:4054123-4054306
  hyper
  pancreas_gallbladder vs. bladder_and_urothelial, liver_bileduct,lung,cervical,lymphoid_neoplasm,renal,anorectal, melanoma
cgaccaggccgggtagacgtcgccgtcgtgggcgccgctgaagtacttcaggtagtagtccatgacgcccttgtcgtcggcccgcgactcctcgtcgctgtcccccgccgcggcccccgcccggcccaccgatgacatcatctgctgcagcagcgtgctggccgccagcccgtccacgtcggg

SEQ ID NO: 473920 - DNA, 56 bp, Homo sapiens; identical to SEQ ID NO: 473917
  chr19:4054380-4054436
  hyper
  pancreas_gallbladder vs. bladder_and_urothelial, liver_bileduct,lung,cervical,lymphoid_neoplasm,renal,anorectal, melanoma

SEQ ID NO: 473921 - DNA, 171 bp, Homo sapiens
  chr19:4054471-4054642
  hyper
  pancreas_gallbladder vs. bladder_and_urothelial, liver_bileduct,lung,cervical,lymphoid_neoplasm,renal,anorectal, melanoma
ggtgggggcgtcctcatcccgctctggccacagacccgggttgctgtcgccctcgtccccgtcccccgtcgggggccgctcggccggggggcccggcccatagaagtctaagccgttgcagtcgcccgcggccacggcggccacagcggcggccacggcctccttggtggc

SEQ ID NO: 473922 - DNA, 186 bp, Homo sapiens
  chr19:4054917-4055103
  hyper
  pancreas_gallbladder vs. bladder_and_urothelial, liver_bileduct,lung,cervical,lymphoid_neoplasm,renal,anorectal, melanoma
ccacgttggctgtgctgacggtgagcgtggccgtgtaggcgaagtccatgagcgcggtgagcgcctcggcgctgacgaagtcgatctcgtacacgttctgctggtccaccacggcgcccgacgtgaacagcttcttgaagtactggctgcaggcggccagcaccgagcggtgcgtggggaactcgc

SEQ ID NO: 473923 - DNA, 520 bp, Homo sapiens; identical to SEQ ID NO: 352163
  chr19:4054917-4055437
  hyper
  pancreas_gallbladder vs. bladder_and_urothelial, liver_bileduct,lung,melanoma

SEQ ID NO: 473924 - DNA, 33 bp, Homo sapiens; identical to SEQ ID NO: 361387
  chr19:4304684-4304717
  hyper
  pancreas_gallbladder vs. bladder_and_urothelial

SEQ ID NO: 473925 - DNA, 302 bp, Homo sapiens; identical to SEQ ID NO: 459507
  chr19:5293673-5293975
  hyper
  pancreas_gallbladder vs. cervical

SEQ ID NO: 473926 - DNA, 304 bp, Homo sapiens
  chr19:5293673-5293977
  hyper
  pancreas_gallbladder vs. bladder_and_urothelial,cervical, anorectal,upper_gi
gttcccctcccagtctgggtgggaccggaggcacggtgatgggggcggggggcgtcccctcttccccctcttagaccagagggtaggggagaggtgcgggcgcagaggcttccctcccgctgggggtccaggggaatgaatggggggacaccgtggcagaggcccccaccctcgccacaagcctgaggagggggcggagagcacagggccagattggaaacagatggggccgccgtgccaggcccgcgacaccggagcagagggagaggaggagggagagggaggggcagacctgtccgggcgg

SEQ ID NO: 473927 - DNA, 1 bp, Homo sapiens
  chr19:5294320-5294321
  hyper
  pancreas_gallbladder vs. bladder_and_urothelial,cervical, anorectal,upper_gi
c

SEQ ID NO: 473928 - DNA, 66 bp, Homo sapiens; identical to SEQ ID NO: 459508
  chr19:6590260-6590326
  hyper
  pancreas_gallbladder vs. lymphoid_neoplasm,renal

SEQ ID NO: 473929 - DNA, 323 bp, Homo sapiens; identical to SEQ ID NO: 361399
  chr19:6590881-6591204
  hyper
  pancreas_gallbladder vs. lymphoid_neoplasm,renal

SEQ ID NO: 473930 - DNA, 73 bp, Homo sapiens; identical to SEQ ID NO: 462602
  chr19:8115163-8115236
  hyper
  pancreas_gallbladder vs. ovary

SEQ ID NO: 473931 - DNA, 685 bp, Homo sapiens; identical to SEQ ID NO: 335930
  chr19:8274278-8274963
  hyper
  pancreas_gallbladder vs. lung,cervical

SEQ ID NO: 473932 - DNA, 169 bp, Homo sapiens; identical to SEQ ID NO: 335936
  chr19:10207022-10207191
  hyper
  pancreas_gallbladder vs. upper_gi

SEQ ID NO: 473933 - DNA, 215 bp, Homo sapiens; identical to SEQ ID NO: 459511
  chr19:10400761-10400976
  hyper
  pancreas_gallbladder vs. lung,head_and_neck

SEQ ID NO: 473934 - DNA, 215 bp, Homo sapiens; identical to SEQ ID NO: 459511
  chr19:10400761-10400976
  hyper
  pancreas_gallbladder vs. lung

SEQ ID NO: 473935 - DNA, 279 bp, Homo sapiens; identical to SEQ ID NO: 462605
  chr19:10401208-10401487
  hyper
  pancreas_gallbladder vs. lung

SEQ ID NO: 473936 - DNA, 485 bp, Homo sapiens; identical to SEQ ID NO: 462606
  chr19:10529649-10530134
  hyper
  pancreas_gallbladder vs. bladder_and_urothelial

SEQ ID NO: 473937 - DNA, 111 bp, Homo sapiens; identical to SEQ ID NO: 352184
  chr19:10530526-10530637
  hyper
  pancreas_gallbladder vs. bladder_and_urothelial

SEQ ID NO: 473938 - DNA, 631 bp, Homo sapiens; identical to SEQ ID NO: 457670
  chr19:10530654-10531285
  hyper
  pancreas_gallbladder vs. breast,sarcoma,uterine,prostate, head_and_neck

SEQ ID NO: 473939 - DNA, 139 bp, Homo sapiens; identical to SEQ ID NO: 457671
  chr19:10531146-10531285
  hyper
  pancreas_gallbladder vs. breast,uterine,sarcoma,prostate, head_and_neck

SEQ ID NO: 473940 - DNA, 598 bp, Homo sapiens; identical to SEQ ID NO: 464347
  chr19:11491655-11492253
  hyper
  pancreas_gallbladder vs. upper_gi

SEQ ID NO: 473941 - DNA, 183 bp, Homo sapiens; identical to SEQ ID NO: 464348
  chr19:11492070-11492253
  hyper
  pancreas_gallbladder vs. upper_gi

SEQ ID NO: 473942 - DNA, 135 bp, Homo sapiens; identical to SEQ ID NO: 464349
  chr19:11492528-11492663
  hyper
  pancreas_gallbladder vs. upper_gi

SEQ ID NO: 473943 - DNA, 51 bp, Homo sapiens
  chr19:11531278-11531329
  hyper
  pancreas_gallbladder vs. cervical,upper_gi,ovary,uterine
cggtaacatttattgcgcaactctgaggccggggcggacccagctggggag

SEQ ID NO: 473944 - DNA, 38 bp, Homo sapiens
  chr19:11531888-11531926
  hyper
  pancreas_gallbladder vs. cervical,upper_gi,ovary,uterine
ggatgggaagcgagagaggaaggtgggcggggccaggg

SEQ ID NO: 473945 - DNA, 68 bp, Homo sapiens; identical to SEQ ID NO: 462612
  chr19:11592604-11592672
  hyper
  pancreas_gallbladder vs. ovary

SEQ ID NO: 473946 - DNA, 189 bp, Homo sapiens; identical to SEQ ID NO: 347537
  chr19:11593453-11593642
  hyper
  pancreas_gallbladder vs. anorectal,melanoma

SEQ ID NO: 473947 - DNA, 1 bp, Homo sapiens
  chr19:12995814-12995815
  hyper
  pancreas_gallbladder vs. upper_gi
c

SEQ ID NO: 473948 - DNA, 221 bp, Homo sapiens; identical to SEQ ID NO: 454280
  chr19:12995851-12996072
  hyper
  pancreas_gallbladder vs. upper_gi

SEQ ID NO: 473949 - DNA, 162 bp, Homo sapiens; identical to SEQ ID NO: 454282
  chr19:16186802-16186964
  hyper
  pancreas_gallbladder vs. lung,upper_gi,liver_bileduct

SEQ ID NO: 473950 - DNA, 102 bp, Homo sapiens; identical to SEQ ID NO: 205249
  chr19:16187000-16187102
  hyper
  pancreas_gallbladder vs. lung,upper_gi,liver_bileduct

SEQ ID NO: 473951 - DNA, 517 bp, Homo sapiens; identical to SEQ ID NO: 454284
  chr19:16187104-16187621
  hyper
  pancreas_gallbladder vs. lung,upper_gi,liver_bileduct

SEQ ID NO: 473952 - DNA, 148 bp, Homo sapiens; identical to SEQ ID NO: 454285
  chr19:16187640-16187788
  hyper
  pancreas_gallbladder vs. lung,upper_gi,liver_bileduct

SEQ ID NO: 473953 - DNA, 329 bp, Homo sapiens; identical to SEQ ID NO: 454286
  chr19:16187292-16187621
  hyper
  pancreas_gallbladder vs. lung,upper_gi,liver_bileduct

SEQ ID NO: 473954 - DNA, 634 bp, Homo sapiens; identical to SEQ ID NO: 345579
  chr19:16187640-16188274
  hyper
  pancreas_gallbladder vs. lung,upper_gi,liver_bileduct

SEQ ID NO: 473955 - DNA, 106 bp, Homo sapiens; identical to SEQ ID NO: 459516
  chr19:17392397-17392503
  hyper
  pancreas_gallbladder vs. bladder_and_urothelial, anorectal

SEQ ID NO: 473956 - DNA, 240 bp, Homo sapiens; identical to SEQ ID NO: 462619
  chr19:17716539-17716779
  hyper
  pancreas_gallbladder vs. uterine,upper_gi

SEQ ID NO: 473957 - DNA, 6 bp, Homo sapiens
  chr19:17717524-17717530
  hyper
  pancreas_gallbladder vs. uterine
ccgcac

SEQ ID NO: 473958 - DNA, 161 bp, Homo sapiens; identical to SEQ ID NO: 352238
  chr19:17984912-17985073
  hyper
  pancreas_gallbladder vs. upper_gi

SEQ ID NO: 473959 - DNA, 13 bp, Homo sapiens
  chr19:30019101-30019114
  hyper
  pancreas_gallbladder vs. ovary,bladder_and_urothelial, renal,uterine,myeloid_neoplasm,prostate,non_cancer,thyroid, melanoma,multiple_myeloma,breast
cggcaggtgtgca

SEQ ID NO: 473960 - DNA, 61 bp, Homo sapiens; identical to SEQ ID NO: 455841
  chr19:30718934-30718995
  hyper
  pancreas_gallbladder vs. melanoma,prostate

SEQ ID NO: 473961 - DNA, 378 bp, Homo sapiens; identical to SEQ ID NO: 336086
  chr19:35758216-35758594
  hyper
  pancreas_gallbladder vs. liver_bileduct

SEQ ID NO: 473962 - DNA, 208 bp, Homo sapiens
  chr19:36351581-36351789
  hyper
  pancreas_gallbladder vs. upper_gi
cggcctgtgggtgtggtcaaaggtggccgtggctttcagggctgttgagggtcggggcctggaggggcggggccgggagagcgagcgtggggtattaggaggaggagagtgtggagctggggcatattcttgcgccctagagggtgtggtgtttctgtggggctggctgatcccaggtcagtggctgcattccgccccggccatgtga

SEQ ID NO: 473963 - DNA, 8 bp, Homo sapiens
  chr19:36352368-36352376
  hyper
  pancreas_gallbladder vs. upper_gi
acagaccc

SEQ ID NO: 473964 - DNA, 4 bp, Homo sapiens
  chr19:36909065-36909069
  hyper
  pancreas_gallbladder vs. sarcoma,prostate,breast, bladder_and_urothelial,renal,ovary,myeloid_neoplasm
cgcc

SEQ ID NO: 473965 - DNA, 32 bp, Homo sapiens; identical to SEQ ID NO: 459521
  chr19:37095634-37095666
  hyper
  pancreas_gallbladder vs. breast,uterine,ovary, bladder_and_urothelial

SEQ ID NO: 473966 - DNA, 105 bp, Homo sapiens; identical to SEQ ID NO: 347589
  chr19:37096594-37096699
  hyper
  pancreas_gallbladder vs. uterine,breast,prostate,ovary, sarcoma,myeloid_neoplasm

SEQ ID NO: 473967 - DNA, 38 bp, Homo sapiens; identical to SEQ ID NO: 453024
  chr19:38182720-38182758
  hyper
  pancreas_gallbladder vs. breast,sarcoma,prostate,ovary, multiple_myeloma,myeloid_neoplasm,bladder_and_urothelial, uterine,melanoma

SEQ ID NO: 473968 - DNA, 68 bp, Homo sapiens
  chr19:39997621-39997689
  hyper
  pancreas_gallbladder vs. head_and_neck,breast
cgggcaggtgggtccccggctcccggactgcgccctctgatgctcccttccccacaggcggactctgc

SEQ ID NO: 473969 - DNA, 58 bp, Homo sapiens; identical to SEQ ID NO: 459526
  chr19:41119120-41119178
  hyper
  pancreas_gallbladder vs. upper_gi

SEQ ID NO: 473970 - DNA, 68 bp, Homo sapiens; identical to SEQ ID NO: 459527
  chr19:41119735-41119803
  hyper
  pancreas_gallbladder vs. upper_gi

SEQ ID NO: 473971 - DNA, 3 bp, Homo sapiens
  chr19:45655296-45655299
  hyper
  pancreas_gallbladder vs. cervical,anorectal,sarcoma
cgg

SEQ ID NO: 473972 - DNA, 118 bp, Homo sapiens; identical to SEQ ID NO: 454295
  chr19:45656461-45656579
  hyper
  pancreas_gallbladder vs. cervical

SEQ ID NO: 473973 - DNA, 3 bp, Homo sapiens
  chr19:50393295-50393298
  hyper
  pancreas_gallbladder vs. cervical
cgc

SEQ ID NO: 473974 - DNA, 219 bp, Homo sapiens; identical to SEQ ID NO: 453035
  chr19:50553779-50553998
  hyper
  pancreas_gallbladder vs. bladder_and_urothelial, colorectal,uterine

SEQ ID NO: 473975 - DNA, 16 bp, Homo sapiens
  chr19:50833813-50833829
  hyper
  pancreas_gallbladder vs. melanoma,upper_gi
cgaggcgagaacttct

SEQ ID NO: 473976 - DNA, 446 bp, Homo sapiens; identical to SEQ ID NO: 352368
  chr19:50833970-50834416
  hyper
  pancreas_gallbladder vs. melanoma,upper_gi

SEQ ID NO: 473977 - DNA, 77 bp, Homo sapiens; identical to SEQ ID NO: 336229
  chr19:51111319-51111396
  hyper
  pancreas_gallbladder vs. sarcoma

SEQ ID NO: 473978 - DNA, 2 bp, Homo sapiens
  chr19:51142491-51142493
  hyper
  pancreas_gallbladder vs. ovary
cg

SEQ ID NO: 473979 - DNA, 96 bp, Homo sapiens; identical to SEQ ID NO: 361688
  chr19:51143111-51143207
  hyper
  pancreas_gallbladder vs. ovary

SEQ ID NO: 473980 - DNA, 231 bp, Homo sapiens; identical to SEQ ID NO: 457762
  chr19:51161455-51161686
  hyper
  pancreas_gallbladder vs. melanoma

SEQ ID NO: 473981 - DNA, 71 bp, Homo sapiens; identical to SEQ ID NO: 457763
  chr19:51161615-51161686
  hyper
  pancreas_gallbladder vs. melanoma,ovary,thyroid

SEQ ID NO: 473982 - DNA, 28 bp, Homo sapiens
  chr19:51198097-51198125
  hyper
  pancreas_gallbladder vs. bladder_and_urothelial,breast
cgccaccgcgggccggggcctgccggcc

SEQ ID NO: 473983 - DNA, 51 bp, Homo sapiens; identical to SEQ ID NO: 352375
  chr19:51198271-51198322
  hyper
  pancreas_gallbladder vs. bladder_and_urothelial,breast

SEQ ID NO: 473984 - DNA, 73 bp, Homo sapiens; identical to SEQ ID NO: 345605
  chr19:51228809-51228882
  hyper
  pancreas_gallbladder vs. melanoma,ovary,prostate,uterine, cervical,breast,thyroid,head_and_neck,lung,non_cancer, myeloid_neoplasm,bladder_and_urothelial,renal,colorectal, multiple_myeloma,anorectal

SEQ ID NO: 473985 - DNA, 274 bp, Homo sapiens
  chr19:52551831-52552105
  hyper
  pancreas_gallbladder vs. upper_gi,lung,breast,cervical
cgcccccgcctcccccaacccccgcgctacctccaccatatagcgccaccaacaacgcagacgccctcagaaagctccctcccaccacgtttccacgccctgacccacacactgacctgactctccttggaatcgccgcgacctcttaaaagctgaacttacttccctaaacttcttccacttctgggcccctcgcccaactccctccccctctaaacctccagagacggtcagccgcgtttccatggagagcggaatgcggccttccggcttt

SEQ ID NO: 473986 - DNA, 465 bp, Homo sapiens; identical to SEQ ID NO: 352387
  chr19:52552233-52552698
  hyper
  pancreas_gallbladder vs. upper_gi,lung,breast,cervical

SEQ ID NO: 473987 - DNA, 153 bp, Homo sapiens
  chr19:56988132-56988285
  hyper
  pancreas_gallbladder vs. ovary,melanoma,prostate
cgcaaagccactgacgctaagtggcagacagacgcccaggcaagtcacacagtaacccaaggctacaataaacgcccacatcagcctgacactgacacacgcacacactccagaaacacaaatcttcacagtcagcgtcacacacccactccc

SEQ ID NO: 473988 - DNA, 29 bp, Homo sapiens
  chr19:58239193-58239222
  hyper
  pancreas_gallbladder vs. lymphoid_neoplasm,melanoma
ccgagtttcaaagggctgacaggacttcc

SEQ ID NO: 473989 - DNA, 106 bp, Homo sapiens
  chr2:945447-945553
  hyper
  pancreas_gallbladder vs. lung
cgtggcctccgcgatgggcgctcgtgcctgggtcgaaggactggggggcggaggatttggaaagggagaaaaatacgggctggcttctttttaaaaaatgtgggta

SEQ ID NO: 473990 - DNA, 420 bp, Homo sapiens
  chr2:18060198-18060618
  hyper
  pancreas_gallbladder vs. lung,bladder_and_urothelial
cgaccccgagggtctacggccgcagagcactttccgtccttctgggcgtctggcccgcggcgcccgcatcctctggtccccagagcccgccgtcgctggagccctaaggctccgcctgttgcgtgaactgcgggctgttgaagcggtggctgggttgatttgaaagcctcggggaaggtatttaggatcagctttcggggagtggggtgggctatggtcagggggaggaccacctggaggcgggagaatcgatgagccgaagaaaggcggcacctcgcgtaggggcatccccggggcgtttccttggccgggaagccgttccttcccttcctcgagaggaggcgctttcctggcgcttgtaaatgcttcccgggccgtctgctccgccttctttgtcattcctcccctcccctttgccct

SEQ ID NO: 473991 - DNA, 5 bp, Homo sapiens
  chr2:25391009-25391014
  hyper
  pancreas_gallbladder vs. myeloid_neoplasm,ovary,uterine, non_cancer,breast
cgaaa

SEQ ID NO: 473992 - DNA, 22 bp, Homo sapiens
  chr2:25391734-25391756
  hyper
  pancreas_gallbladder vs. myeloid_neoplasm,ovary,uterine, non_cancer,breast
gcacccccgtgtggggcaggcc

SEQ ID NO: 473993 - DNA, 38 bp, Homo sapiens; identical to SEQ ID NO: 454314
  chr2:30453530-30453568
  hyper
  pancreas_gallbladder vs. ovary,myeloid_neoplasm, non_cancer,uterine,thyroid

SEQ ID NO: 473994 - DNA, 9 bp, Homo sapiens
  chr2:40679688-40679697
  hyper
  pancreas_gallbladder vs. bladder_and_urothelial,ovary
cgcctaccc

SEQ ID NO: 473995 - DNA, 77 bp, Homo sapiens; identical to SEQ ID NO: 454316
  chr2:42720186-42720263
  hyper
  pancreas_gallbladder vs. cervical

SEQ ID NO: 473996 - DNA, 194 bp, Homo sapiens; identical to SEQ ID NO: 331303
  chr2:60777883-60778077
  hyper
  pancreas_gallbladder vs. upper_gi

SEQ ID NO: 473997 - DNA, 51 bp, Homo sapiens
  chr2:60780349-60780400
  hyper
  pancreas_gallbladder vs. colorectal
cgcgagaattcccgtttgcttaagtgctggggtttgccttgcttgcggcga

SEQ ID NO: 473998 - DNA, 54 bp, Homo sapiens; identical to SEQ ID NO: 346439
  chr2:63287368-63287422
  hyper
  pancreas_gallbladder vs. cervical

SEQ ID NO: 473999 - DNA, 79 bp, Homo sapiens; identical to SEQ ID NO: 346440
  chr2:68547270-68547349
  hyper
  pancreas_gallbladder vs. melanoma

SEQ ID NO: 474000 - DNA, 443 bp, Homo sapiens
  chr2:71453505-71453948
  hyper
  pancreas_gallbladder vs. bladder_and_urothelial
cgaacgtctcccaggcaaatgaggcatgaagaatgagggctggagtcaagggggagatggagcaagtataaaaaggcagaggacgcgcaggggccgcgaataggggaagggcacgacgcgcaatccctcccgctccagcccggggagaggggcgggggatgccgcgcgggtcaatttgcctagcattgttgcacctgggtagaaatgggactcaggccaagaattcggttcgagtgttaggaggacgctgaggggagtcaggaacttgggtgggagtcggggggaaacagagcacctgtgcgggggggaaagggacgaaaaccccctattgctcccgaggggcaggggctgaccccagcggacgccccttttcgccgatggccgcgacgtgggaccccgcgcgctttccctccctacaggagctcgggcaggcgcgtgccgcc

SEQ ID NO: 474001 - DNA, 128 bp, Homo sapiens; identical to SEQ ID NO: 471154
  chr2:71453820-71453948
  hyper

SEQ ID NO: 474002 - DNA, 228 bp, Homo sapiens; identical to SEQ ID NO: 349516
  chr2:71454386-71454614
  hyper

SEQ ID NO: 474003 - DNA, 121 bp, Homo sapiens; identical to SEQ ID NO: 454323
  chr2:73147029-73147150
  hyper
  pancreas_gallbladder vs. thyroid

SEQ ID NO: 474004 - DNA, 16 bp, Homo sapiens
  chr2:73148243-73148259
  hyper
  pancreas_gallbladder vs. uterine,thyroid, myeloid_neoplasm
ggaccccgggtgcttc

SEQ ID NO: 474005 - DNA, 144 bp, Homo sapiens; identical to SEQ ID NO: 349540
  chr2:88752878-88753022
  hyper
  pancreas_gallbladder vs. uterine

SEQ ID NO: 474006 - DNA, 144 bp, Homo sapiens; identical to SEQ ID NO: 345031
  chr2:105471069-105471213
  hyper
  pancreas_gallbladder vs. melanoma,renal,multiple_myeloma, non_cancer,uterine

SEQ ID NO: 474007 - DNA, 455 bp, Homo sapiens
  chr2:105760109-105760564
  hyper
  pancreas_gallbladder vs. uterine
cgaaagcgaggtgtgcgggcgggtggaaggaggaaggtgagggttcttcctagaggtgaccaggtgaggccgggagtcgagcattttcataagattgctcgcggacgcgggggtgggtggagagcatcacgattaagaaggaacacacgcacgcacacacacacctccttcctccttcccctcctcttcctctcaccccgccccccggggggcggtaccctagtctcccgggggaggttttggggcggaggaccgcggaggactgcgcccaggagggtggccggccgcgggaggaggacttggggtcgggctgctgcagctgggtggccagcgccgcggcggcccctcccccgctctccctggccgccgccccctcctcctcccgtcctcctcctcctctccctcctcccggtcccccatcctcctcccggcccccggcagctgcggctcgggga

SEQ ID NO: 474008 - DNA, 6 bp, Homo sapiens
  chr2:114034670-114034676
  hyper
  pancreas_gallbladder vs. cervical
cgcgcc

SEQ ID NO: 474009 - DNA, 34 bp, Homo sapiens; identical to SEQ ID NO: 460951
  chr2:114035443-114035477
  hyper
  pancreas_gallbladder vs. cervical

SEQ ID NO: 474010 - DNA, 31 bp, Homo sapiens; identical to SEQ ID NO: 453113
  chr2:118981062-118981093
  hyper
  pancreas_gallbladder vs. multiple_myeloma,non_cancer, colorectal,myeloid_neoplasm

SEQ ID NO: 474011 - DNA, 261 bp, Homo sapiens; identical to SEQ ID NO: 466953
  chr2:121200130-121200391
  hyper
  pancreas_gallbladder vs. upper_gi

SEQ ID NO: 474012 - DNA, 242 bp, Homo sapiens
  chr2:121200454-121200696
  hyper
  pancreas_gallbladder vs. upper_gi
ttgcccgaagtcccacggctggtcagtggcaagtggacagtggcaactgcgcctggaaaacgccgtccgtggcgcggtcgcggcgccaggggcatgcctgacagccaccttctctcccgtgaccgccgggctccgcatcagggcgagccactcggctcgggagagcaggaaactggggagggccgagcctccggccacgccttgtcagccccggagcctccaccaatcccgggcccggaaag

SEQ ID NO: 474013 - DNA, 56 bp, Homo sapiens; identical to SEQ ID NO: 349576
  chr2:121200731-121200787
  hyper
  pancreas_gallbladder vs. upper_gi

SEQ ID NO: 474014 - DNA, 382 bp, Homo sapiens; identical to SEQ ID NO: 459587
  chr2:127413347-127413729
  hyper
  pancreas_gallbladder vs. melanoma,lymphoid_neoplasm, liver_bileduct,sarcoma,renal

SEQ ID NO: 474015 - DNA, 53 bp, Homo sapiens; identical to SEQ ID NO: 459588
  chr2:127413676-127413729
  hyper
  pancreas_gallbladder vs. melanoma,liver_bileduct,sarcoma, lymphoid_neoplasm,renal

SEQ ID NO: 474016 - DNA, 255 bp, Homo sapiens; identical to SEQ ID NO: 349581
  chr2:127414108-127414363
  hyper
  pancreas_gallbladder vs. melanoma,liver_bileduct,sarcoma, lymphoid_neoplasm,renal

SEQ ID NO: 474017 - DNA, 6 bp, Homo sapiens
  chr2:127535179-127535185
  hyper
  pancreas_gallbladder vs. liver_bileduct,melanoma,breast, bladder_and_urothelial
aagggc

SEQ ID NO: 474018 - DNA, 49 bp, Homo sapiens; identical to SEQ ID NO: 453114
  chr2:127782995-127783044
  hyper
  pancreas_gallbladder vs. renal

SEQ ID NO: 474019 - DNA, 94 bp, Homo sapiens; identical to SEQ ID NO: 457865
  chr2:136874839-136874933
  hyper
  pancreas_gallbladder vs. lymphoid_neoplasm

SEQ ID NO: 474020 - DNA, 427 bp, Homo sapiens; identical to SEQ ID NO: 457866
  chr2:136875399-136875826
  hyper
  pancreas_gallbladder vs. lymphoid_neoplasm

SEQ ID NO: 474021 - DNA, 61 bp, Homo sapiens; identical to SEQ ID NO: 466964
  chr2:137523039-137523100
  hyper
  pancreas_gallbladder vs. sarcoma,lung

SEQ ID NO: 474022 - DNA, 102 bp, Homo sapiens; identical to SEQ ID NO: 357316
  chr2:137523676-137523778
  hyper
  pancreas_gallbladder vs. sarcoma,lung

SEQ ID NO: 474023 - DNA, 35 bp, Homo sapiens; identical to SEQ ID NO: 349594
  chr2:145275891-145275926
  hyper
  pancreas_gallbladder vs. lymphoid_neoplasm,renal, bladder_and_urothelial,lung,head_and_neck,melanoma

SEQ ID NO: 474024 - DNA, 1 bp, Homo sapiens
  chr2:145282267-145282268
  hyper
  pancreas_gallbladder vs. melanoma,lymphoid_neoplasm, renal,bladder_and_urothelial,uterine,non_cancer, myeloid_neoplasm,ovary,sarcoma
c

SEQ ID NO: 474025 - DNA, 51 bp, Homo sapiens; identical to SEQ ID NO: 453124
  chr2:149632592-149632643
  hyper
  pancreas_gallbladder vs. ovary,sarcoma,prostate,breast, thyroid,bladder_and_urothelial,non_cancer,uterine,melanoma

SEQ ID NO: 474026 - DNA, 238 bp, Homo sapiens; identical to SEQ ID NO: 345045
  chr2:149634146-149634384
  hyper
  pancreas_gallbladder vs. prostate,bladder_and_urothelial, ovary,breast,sarcoma

SEQ ID NO: 474027 - DNA, 109 bp, Homo sapiens; identical to SEQ ID NO: 357334
  chr2:154335663-154335772
  hyper
  pancreas_gallbladder vs. lung,bladder_and_urothelial, breast

SEQ ID NO: 474028 - DNA, 128 bp, Homo sapiens; identical to SEQ ID NO: 464434
  chr2:172947590-172947718
  hyper
  pancreas_gallbladder vs. upper_gi

SEQ ID NO: 474029 - DNA, 76 bp, Homo sapiens; identical to SEQ ID NO: 346489
  chr2:172950233-172950309
  hyper
  pancreas_gallbladder vs. head_and_neck,colorectal

SEQ ID NO: 474030 - DNA, 231 bp, Homo sapiens; identical to SEQ ID NO: 457886
  chr2:172950233-172950464
  hyper
  pancreas_gallbladder vs. upper_gi

SEQ ID NO: 474031 - DNA, 233 bp, Homo sapiens; identical to SEQ ID NO: 349624
  chr2:172950493-172950726
  hyper
  pancreas_gallbladder vs. upper_gi

SEQ ID NO: 474032 - DNA, 42 bp, Homo sapiens; identical to SEQ ID NO: 454338
  chr2:175190730-175190772
  hyper
  pancreas_gallbladder vs. cervical

SEQ ID NO: 474033 - DNA, 351 bp, Homo sapiens; identical to SEQ ID NO: 454339
  chr2:175199018-175199369
  hyper
  pancreas_gallbladder vs. uterine,colorectal

SEQ ID NO: 474034 - DNA, 206 bp, Homo sapiens; identical to SEQ ID NO: 462740
  chr2:175199935-175200141
  hyper
  pancreas_gallbladder vs. colorectal

SEQ ID NO: 474035 - DNA, 274 bp, Homo sapiens
  chr2:176972103-176972377
  hyper
  pancreas_gallbladder vs. anorectal
cggccagagcgcagccagcatgtacctgccgggctgcgcctactatgtggccccgtctgacttcgctagcaagccttcgttcctttcccaaccgtcgtcctgccagatgactttcccctactcttccaacctggctccgcacgtccagcccgtgcgcgaagtggccttccgcgactacggcctggagcgcgccaagtggccgtaccgcggcggcggcggcggcggcagcgcggggggcggcagcagcgggggcggccccggcgggggcggcggc

SEQ ID NO: 474036 - DNA, 61 bp, Homo sapiens; identical to SEQ ID NO: 349639
  chr2:176995668-176995729
  hyper
  pancreas_gallbladder vs. colorectal,cervical

SEQ ID NO: 474037 - DNA, 22 bp, Homo sapiens
  chr2:177001081-177001103
  hyper
  pancreas_gallbladder vs. colorectal,anorectal, bladder_and_urothelial,renal,sarcoma,ovary,prostate, myeloid_neoplasm,uterine
cgggggagagagaaagcagaag

SEQ ID NO: 474038 - DNA, 41 bp, Homo sapiens; identical to SEQ ID NO: 462744
  chr2:177042492-177042533
  hyper
  pancreas_gallbladder vs. anorectal, bladder_and_urothelial,cervical,uterine

SEQ ID NO: 474039 - DNA, 220 bp, Homo sapiens; identical to SEQ ID NO: 466996
  chr2:177052744-177052964
  hyper
  pancreas_gallbladder vs. lung,colorectal

SEQ ID NO: 474040 - DNA, 5 bp, Homo sapiens
  chr2:182321353-182321358
  hyper
  pancreas_gallbladder vs. multiple_myeloma, myeloid_neoplasm,lymphoid_neoplasm,non_cancer,uterine,sarcoma, ovary,thyroid,prostate
cgtgg

SEQ ID NO: 474041 - DNA, 34 bp, Homo sapiens; identical to SEQ ID NO: 345053
  chr2:182323095-182323129
  hyper
  pancreas_gallbladder vs. thyroid,non_cancer, myeloid_neoplasm,lymphoid_neoplasm,multiple_myeloma,uterine, renal

SEQ ID NO: 474042 - DNA, 11 bp, Homo sapiens
  chr2:207139040-207139051
  hyper
  pancreas_gallbladder vs. melanoma
cggaaacgact

SEQ ID NO: 474043 - DNA, 240 bp, Homo sapiens
  chr2:207308960-207309200
  hyper
  pancreas_gallbladder vs. head_and_neck,anorectal,uterine, sarcoma,melanoma,myeloid_neoplasm,bladder_and_urothelial, thyroid,prostate
attcatcccagttcacttttggaagtccatttctgttgcattcgcgaaaaacccattccaattcttgttggttccactgggaggtgtttagtggatcctgggtccctcagcgatctctgtgcaacttgcggaggggcaaccagtggatgggaaatacagcgagggagcaagttgctacttgcgtggtggaaccttaatgtgaatgcggggaggatgtagtgataatagtggtaatgggct

SEQ ID NO: 474044 - DNA, 33 bp, Homo sapiens; identical to SEQ ID NO: 469010
  chr2:217558872-217558905
  hyper
  pancreas_gallbladder vs. anorectal

SEQ ID NO: 474045 - DNA, 21 bp, Homo sapiens
  chr2:217559556-217559577
  hyper
  pancreas_gallbladder vs. anorectal
aaaggggccaagagggccccc

SEQ ID NO: 474046 - DNA, 5 bp, Homo sapiens
  chr2:225906006-225906011
  hyper
  pancreas_gallbladder vs. lymphoid_neoplasm,sarcoma, prostate,non_cancer,lung,breast,cervical,myeloid_neoplasm,ovary, thyroid
cggat

SEQ ID NO: 474047 - DNA, 237 bp, Homo sapiens; identical to SEQ ID NO: 459601
  chr2:225906168-225906405
  hyper
  pancreas_gallbladder vs. lymphoid_neoplasm,sarcoma, prostate,non_cancer,lung,breast,cervical,myeloid_neoplasm,ovary, thyroid

SEQ ID NO: 474048 - DNA, 77 bp, Homo sapiens; identical to SEQ ID NO: 454345
  chr2:225906328-225906405
  hyper
  pancreas_gallbladder vs. lymphoid_neoplasm,non_cancer, prostate,multiple_myeloma,breast,myeloid_neoplasm,lung,thyroid, cervical,sarcoma,renal,ovary,melanoma

SEQ ID NO: 474049 - DNA, 624 bp, Homo sapiens; identical to SEQ ID NO: 457903
  chr2:232790030-232790654
  hyper
  pancreas_gallbladder vs. head_and_neck

SEQ ID NO: 474050 - DNA, 20 bp, Homo sapiens
  chr2:232790784-232790804
  hyper
  pancreas_gallbladder vs. head_and_neck
tctcctgggtcctgcgcgcc

SEQ ID NO: 474051 - DNA, 342 bp, Homo sapiens; identical to SEQ ID NO: 453146
  chr2:232790312-232790654
  hyper
  pancreas_gallbladder vs. head_and_neck, bladder_and_urothelial

SEQ ID NO: 474052 - DNA, 264 bp, Homo sapiens; identical to SEQ ID NO: 453147
  chr2:232790784-232791048
  hyper
  pancreas_gallbladder vs. head_and_neck, bladder_and_urothelial

SEQ ID NO: 474053 - DNA, 145 bp, Homo sapiens; identical to SEQ ID NO: 453148
  chr2:232791140-232791285
  hyper
  pancreas_gallbladder vs. head_and_neck, bladder_and_urothelial

SEQ ID NO: 474054 - DNA, 93 bp, Homo sapiens
  chr2:233367692-233367785
  hyper
  pancreas_gallbladder vs. upper_gi
cgggagggaggtttatccgtaggagtcagcccagttgggtcaaactaaggacccagtgcagaccccgaggcccagagacacaggtgtgcgcac

SEQ ID NO: 474055 - DNA, 2 bp, Homo sapiens
  chr20:2781970-2781972
  hyper
  pancreas_gallbladder vs. myeloid_neoplasm,non_cancer, thyroid
tc

SEQ ID NO: 474056 - DNA, 414 bp, Homo sapiens; identical to SEQ ID NO: 347652
  chr20:4804008-4804422
  hyper
  pancreas_gallbladder vs. lymphoid_neoplasm

SEQ ID NO: 474057 - DNA, 206 bp, Homo sapiens; identical to SEQ ID NO: 453161
  chr20:21080357-21080563
  hyper
  pancreas_gallbladder vs. colorectal

SEQ ID NO: 474058 - DNA, 185 bp, Homo sapiens; identical to SEQ ID NO: 457915
  chr20:21086682-21086867
  hyper

SEQ ID NO: 474059 - DNA, 107 bp, Homo sapiens; identical to SEQ ID NO: 361836
  chr20:21087188-21087295
  hyper

SEQ ID NO: 474060 - DNA, 30 bp, Homo sapiens; identical to SEQ ID NO: 467088
  chr20:21487307-21487337
  hyper
  pancreas_gallbladder vs. breast

SEQ ID NO: 474061 - DNA, 108 bp, Homo sapiens; identical to SEQ ID NO: 462766
  chr20:30555779-30555887
  hyper
  pancreas_gallbladder vs. melanoma,uterine,ovary,renal, breast,thyroid

SEQ ID NO: 474062 - DNA, 248 bp, Homo sapiens; identical to SEQ ID NO: 352477
  chr20:30556403-30556651
  hyper
  pancreas_gallbladder vs. melanoma,uterine,ovary,renal, breast,thyroid

SEQ ID NO: 474063 - DNA, 139 bp, Homo sapiens; identical to SEQ ID NO: 453169
  chr20:30639494-30639633
  hyper
  pancreas_gallbladder vs. anorectal

SEQ ID NO: 474064 - DNA, 5 bp, Homo sapiens
  chr20:34188561-34188566
  hyper
  pancreas_gallbladder vs. thyroid,anorectal,non_cancer, head_and_neck,myeloid_neoplasm,cervical
cgtcc

SEQ ID NO: 474065 - DNA, 60 bp, Homo sapiens; identical to SEQ ID NO: 454352
  chr20:34190072-34190132
  hyper
  pancreas_gallbladder vs. anorectal,head_and_neck,sarcoma, thyroid,prostate,non_cancer,lung,cervical,breast, myeloid_neoplasm,renal,uterine

SEQ ID NO: 474066 - DNA, 1 bp, Homo sapiens
  chr20:34190145-34190146
  hyper
  pancreas_gallbladder vs. anorectal,head_and_neck,sarcoma, thyroid,prostate,non_cancer,lung,cervical,breast, myeloid_neoplasm,renal,uterine
c

SEQ ID NO: 474067 - DNA, 100 bp, Homo sapiens; identical to SEQ ID NO: 352489
  chr20:37303401-37303501
  hyper
  pancreas_gallbladder vs. ovary,thyroid,non_cancer, multiple_myeloma

SEQ ID NO: 474068 - DNA, 37 bp, Homo sapiens; identical to SEQ ID NO: 347675
  chr20:37358242-37358279
  hyper
  pancreas_gallbladder vs. multiple_myeloma

SEQ ID NO: 474069 - DNA, 390 bp, Homo sapiens; identical to SEQ ID NO: 455936
  chr20:37433723-37434113
  hyper
  pancreas_gallbladder vs. ovary

SEQ ID NO: 474070 - DNA, 27 bp, Homo sapiens
  chr20:37434086-37434113
  hyper
  pancreas_gallbladder vs. ovary,uterine,multiple_myeloma, bladder_and_urothelial
cggggtgggggttaggaaaactatttt

SEQ ID NO: 474071 - DNA, 51 bp, Homo sapiens; identical to SEQ ID NO: 457931
  chr20:47934774-47934825
  hyper
  pancreas_gallbladder vs. sarcoma,ovary

SEQ ID NO: 474072 - DNA, 217 bp, Homo sapiens; identical to SEQ ID NO: 467124
  chr20:55205088-55205305
  hyper
  pancreas_gallbladder vs. lung,head_and_neck

SEQ ID NO: 474073 - DNA, 136 bp, Homo sapiens; identical to SEQ ID NO: 459635
  chr20:55206463-55206599
  hyper
  pancreas_gallbladder vs. breast,cervical, multiple_myeloma

SEQ ID NO: 474074 - DNA, 4 bp, Homo sapiens
  chr20:55206736-55206740
  hyper
  pancreas_gallbladder vs. breast,cervical, multiple_myeloma
cgag

SEQ ID NO: 474075 - DNA, 95 bp, Homo sapiens; identical to SEQ ID NO: 352515
  chr20:55206774-55206869
  hyper
  pancreas_gallbladder vs. breast,cervical, multiple_myeloma

SEQ ID NO: 474076 - DNA, 103 bp, Homo sapiens; identical to SEQ ID NO: 294893
  chr20:55588994-55589097
  hyper
  pancreas_gallbladder vs. upper_gi

SEQ ID NO: 474077 - DNA, 104 bp, Homo sapiens
  chr20:55841887-55841991
  hyper
  pancreas_gallbladder vs. colorectal
cgggacgtcgcggggatgcggctggaggaatcggagccggccctgccctctcggcactcgcggtccggaccaggaaggcggcccgagcaggacgggtgggctgc

SEQ ID NO: 474078 - DNA, 123 bp, Homo sapiens; identical to SEQ ID NO: 457941
  chr21:27011487-27011610
  hyper
  pancreas_gallbladder vs. sarcoma,uterine, lymphoid_neoplasm,multiple_myeloma,breast,head_and_neck, myeloid_neoplasm,ovary,thyroid,non_cancer,prostate

SEQ ID NO: 474079 - DNA, 134 bp, Homo sapiens; identical to SEQ ID NO: 457942
  chr21:27011639-27011773
  hyper
  pancreas_gallbladder vs. sarcoma,uterine, lymphoid_neoplasm,multiple_myeloma,breast,head_and_neck, myeloid_neoplasm,ovary,thyroid,non_cancer,prostate

SEQ ID NO: 474080 - DNA, 153 bp, Homo sapiens; identical to SEQ ID NO: 345649
  chr21:27012725-27012878
  hyper
  pancreas_gallbladder vs. uterine,sarcoma,breast,ovary, multiple_myeloma,lymphoid_neoplasm,non_cancer,myeloid_neoplasm, prostate,thyroid,head_and_neck,melanoma,lung

SEQ ID NO: 474081 - DNA, 157 bp, Homo sapiens
  chr21:38064301-38064458
  hyper
  pancreas_gallbladder vs. upper_gi
cggcgctcctcccacggcgacacctccgtgctctttttgcttgtatttattcaaaaattagatttgtcaataacgcagggcctggcaaataggaggacctctccaaaattaaatgcaagattgaacataggtctctcacatcataataaagcggttt

SEQ ID NO: 474082 - DNA, 284 bp, Homo sapiens
  chr21:38064683-38064967
  hyper
  pancreas_gallbladder vs. upper_gi
gtctttgtctatactcgcaggatgggaaggacgatggtgcaatcaccgagattattttgttttcgtcctctaaaaaatgaagaggggactggagtcgggaccaaaattattggcagaccgcacggtttgcagtcaccctgaagttaccagcagccgatgctgtgtccagggaaaatattcttgagctggaaaacgtgctaatttaaagtctttcgtttcacacgaaaatgtgctgcactctttgactgctcaggaatttgctctagcacctagaaggaattctg

SEQ ID NO: 474083 - DNA, 221 bp, Homo sapiens; identical to SEQ ID NO: 459658
  chr21:38064746-38064967
  hyper
  pancreas_gallbladder vs. upper_gi

SEQ ID NO: 474084 - DNA, 30 bp, Homo sapiens
  chr21:38066154-38066184
  hyper
  pancreas_gallbladder vs. upper_gi
ggccaacccagcggggcccgcctgcccgcc

SEQ ID NO: 474085 - DNA, 39 bp, Homo sapiens; identical to SEQ ID NO: 467139
  chr21:40032283-40032322
  hyper
  pancreas_gallbladder vs. colorectal

SEQ ID NO: 474086 - DNA, 159 bp, Homo sapiens; identical to SEQ ID NO: 467140
  chr21:40032367-40032526
  hyper
  pancreas_gallbladder vs. colorectal

SEQ ID NO: 474087 - DNA, 65 bp, Homo sapiens; identical to SEQ ID NO: 361990
  chr21:40032848-40032913
  hyper
  pancreas_gallbladder vs. colorectal

SEQ ID NO: 474088 - DNA, 34 bp, Homo sapiens; identical to SEQ ID NO: 459662
  chr21:44847478-44847512
  hyper
  pancreas_gallbladder vs. breast

SEQ ID NO: 474089 - DNA, 56 bp, Homo sapiens; identical to SEQ ID NO: 352570
  chr21:44847864-44847920
  hyper
  pancreas_gallbladder vs. breast

SEQ ID NO: 474090 - DNA, 55 bp, Homo sapiens; identical to SEQ ID NO: 352575
  chr21:47062898-47062953
  hyper
  pancreas_gallbladder vs. lung

SEQ ID NO: 474091 - DNA, 143 bp, Homo sapiens; identical to SEQ ID NO: 453174
  chr21:47063290-47063433
  hyper
  pancreas_gallbladder vs. lung,melanoma,ovary,thyroid, prostate,non_cancer,colorectal

SEQ ID NO: 474092 - DNA, 238 bp, Homo sapiens
  chr22:17849877-17850115
  hyper
  pancreas_gallbladder vs. lung
ggaaagcacttcacttctctaggcttcatatttctagggtggacagcccgctcctgctccggctctgccctcggcatcaataataactgaactcccacacgtgcacgtttctgtctctagcccgaccgaaaggaccaccccgcgggccctttaaaaggacgcgaccactcaggccaagtgggggtgggagagctcctggccgtcctcccttgggaaagtgcttcaactccccagtccc

SEQ ID NO: 474093 - DNA, 238 bp, Homo sapiens; identical to SEQ ID NO: 474092
  chr22:17849877-17850115
  hyper
  pancreas_gallbladder vs. lung,bladder_and_urothelial, ovary,breast

SEQ ID NO: 474094 - DNA, 16 bp, Homo sapiens
  chr22:22005779-22005795
  hyper
  pancreas_gallbladder vs. upper_gi,lung,cervical, bladder_and_urothelial,breast,colorectal,ovary,head_and_neck
cgaagggtaggcgctt

SEQ ID NO: 474095 - DNA, 166 bp, Homo sapiens; identical to SEQ ID NO: 345652
  chr22:22006759-22006925
  hyper
  pancreas_gallbladder vs. upper_gi,lung,colorectal, bladder_and_urothelial,cervical,head_and_neck

SEQ ID NO: 474096 - DNA, 137 bp, Homo sapiens; identical to SEQ ID NO: 453177
  chr22:22862472-22862609
  hyper
  pancreas_gallbladder vs. uterine

SEQ ID NO: 474097 - DNA, 46 bp, Homo sapiens
  chr22:26565120-26565166
  hyper
  pancreas_gallbladder vs. prostate
cgtctggaaaatggtccgggtgctctccagcctggcctggccaggc

SEQ ID NO: 474098 - DNA, 284 bp, Homo sapiens; identical to SEQ ID NO: 362037
  chr22:26565999-26566283
  hyper
  pancreas_gallbladder vs. renal,sarcoma,lung,breast

SEQ ID NO: 474099 - DNA, 135 bp, Homo sapiens; identical to SEQ ID NO: 457958
  chr22:35420072-35420207
  hyper
  pancreas_gallbladder vs. colorectal, bladder_and_urothelial

SEQ ID NO: 474100 - DNA, 73 bp, Homo sapiens; identical to SEQ ID NO: 352607
  chr22:35420315-35420388
  hyper
  pancreas_gallbladder vs. colorectal, bladder_and_urothelial

SEQ ID NO: 474101 - DNA, 5 bp, Homo sapiens
  chr22:38220591-38220596
  hyper
  pancreas_gallbladder vs. cervical,thyroid
cgttc

SEQ ID NO: 474102 - DNA, 23 bp, Homo sapiens
  chr22:46367044-46367067
  hyper
  pancreas_gallbladder vs. melanoma
cgcagggagcgggaaggcagcgg

SEQ ID NO: 474103 - DNA, 237 bp, Homo sapiens; identical to SEQ ID NO: 464508
  chr22:46367124-46367361
  hyper
  pancreas_gallbladder vs. melanoma

SEQ ID NO: 474104 - DNA, 121 bp, Homo sapiens; identical to SEQ ID NO: 462799
  chr22:46367867-46367988
  hyper
  pancreas_gallbladder vs. melanoma

SEQ ID NO: 474105 - DNA, 121 bp, Homo sapiens; identical to SEQ ID NO: 462799
  chr22:46367867-46367988
  hyper
  pancreas_gallbladder vs. melanoma

SEQ ID NO: 474106 - DNA, 1 bp, Homo sapiens
  chr3:13590414-13590415
  hyper
  pancreas_gallbladder vs. anorectal
c

SEQ ID NO: 474107 - DNA, 370 bp, Homo sapiens; identical to SEQ ID NO: 455964
  chr3:16553609-16553979
  hyper
  pancreas_gallbladder vs. lymphoid_neoplasm

SEQ ID NO: 474108 - DNA, 78 bp, Homo sapiens; identical to SEQ ID NO: 345081
  chr3:16555426-16555504
  hyper
  pancreas_gallbladder vs. lymphoid_neoplasm,anorectal, sarcoma,lung,liver_bileduct,renal

SEQ ID NO: 474109 - DNA, 1 bp, Homo sapiens
  chr3:36805537-36805538
  hyper
  pancreas_gallbladder vs. bladder_and_urothelial
c

SEQ ID NO: 474110 - DNA, 196 bp, Homo sapiens; identical to SEQ ID NO: 453202
  chr3:44038922-44039118
  hyper
  pancreas_gallbladder vs. lung,renal

SEQ ID NO: 474111 - DNA, 156 bp, Homo sapiens; identical to SEQ ID NO: 469117
  chr3:44039193-44039349
  hyper
  pancreas_gallbladder vs. ovary

SEQ ID NO: 474112 - DNA, 82 bp, Homo sapiens; identical to SEQ ID NO: 454369
  chr3:50377892-50377974
  hyper
  pancreas_gallbladder vs. upper_gi

SEQ ID NO: 474113 - DNA, 167 bp, Homo sapiens; identical to SEQ ID NO: 346566
  chr3:50378002-50378169
  hyper
  pancreas_gallbladder vs. upper_gi

SEQ ID NO: 474114 - DNA, 202 bp, Homo sapiens; identical to SEQ ID NO: 457978
  chr3:54156155-54156357
  hyper
  pancreas_gallbladder vs. head_and_neck,anorectal,uterine

SEQ ID NO: 474115 - DNA, 9 bp, Homo sapiens
  chr3:132756962-132756971
  hyper
  pancreas_gallbladder vs. lung
cgaaaacag

SEQ ID NO: 474116 - DNA, 65 bp, Homo sapiens; identical to SEQ ID NO: 357691
  chr3:132757908-132757973
  hyper
  pancreas_gallbladder vs. lung

SEQ ID NO: 474117 - DNA, 13 bp, Homo sapiens
  chr3:138679565-138679578
  hyper
  pancreas_gallbladder vs. myeloid_neoplasm
cgggcacagacgc

SEQ ID NO: 474118 - DNA, 79 bp, Homo sapiens; identical to SEQ ID NO: 346596
  chr3:139655101-139655180
  hyper
  pancreas_gallbladder vs. breast,anorectal

SEQ ID NO: 474119 - DNA, 4 bp, Homo sapiens
  chr3:157812151-157812155
  hyper
  pancreas_gallbladder vs. non_cancer
cgca

SEQ ID NO: 474120 - DNA, 138 bp, Homo sapiens; identical to SEQ ID NO: 345119
  chr3:179169640-179169778
  hyper
  pancreas_gallbladder vs. cervical,lung,head_and_neck, ovary,breast,uterine,prostate,bladder_and_urothelial,melanoma, sarcoma,myeloid_neoplasm,anorectal,non_cancer,thyroid

SEQ ID NO: 474121 - DNA, 7 bp, Homo sapiens
  chr3:181429601-181429608
  hyper
  pancreas_gallbladder vs. upper_gi,lung,cervical
cgccccc

SEQ ID NO: 474122 - DNA, 337 bp, Homo sapiens
  chr3:181429718-181430055
  hyper
  pancreas_gallbladder vs. upper_gi,lung,cervical
tgtctattaacttgttcaaaaaagtatcaggagttgtcaaggcagagaagagagtgtttgcaaaagggggaaagtagtttgctgcctctttaagactaggactgagagaaagaagaggagagagaaagaaagggagagaagtttgagccccaggcttaagcctttccaaaaaataataataacaatcatcggcggcggcaggatcggccagaggaggagggaagcgctttttttgatcctgattccagtttgcctctctctttttttcccccaaattattcttcgcctgattttcctcgcggagccctgcgctcccgacacccccgcccgcctcccc

SEQ ID NO: 474123 - DNA, 37 bp, Homo sapiens; identical to SEQ ID NO: 462827
  chr3:181430331-181430368
  hyper
  pancreas_gallbladder vs. upper_gi,lung,cervical

SEQ ID NO: 474124 - DNA, 146 bp, Homo sapiens
  chr3:181430443-181430589
  hyper
  pancreas_gallbladder vs. upper_gi,lung,cervical
cgctgcacatgaaggagcacccggattataaataccggccccggcggaaaaccaagacgctcatgaagaaggataagtacacgctgcccggcgggctgctggcccccggcggcaatagcatggcgagcggggtcggggtgggcgcc

SEQ ID NO: 474125 - DNA, 37 bp, Homo sapiens; identical to SEQ ID NO: 462827
  chr3:181430331-181430368
  hyper
  pancreas_gallbladder vs. upper_gi,lung

SEQ ID NO: 474126 - DNA, 253 bp, Homo sapiens; identical to SEQ ID NO: 462828
  chr3:181430443-181430696
  hyper
  pancreas_gallbladder vs. upper_gi,lung

SEQ ID NO: 474127 - DNA, 99 bp, Homo sapiens
  chr3:181430597-181430696
  hyper
  pancreas_gallbladder vs. upper_gi,head_and_neck, anorectal
cgcgggcgtgaaccagcgcatggacagttacgcgcacatgaacggctggagcaacggcagctacagcatgatgcaggaccagctgggctacccgcagca

SEQ ID NO: 474128 - DNA, 48 bp, Homo sapiens; identical to SEQ ID NO: 454385
  chr3:181444767-181444815
  hyper
  pancreas_gallbladder vs. upper_gi

SEQ ID NO: 474129 - DNA, 48 bp, Homo sapiens; identical to SEQ ID NO: 454385
  chr3:181444767-181444815
  hyper
  pancreas_gallbladder vs. upper_gi

SEQ ID NO: 474130 - DNA, 3 bp, Homo sapiens
  chr3:186078710-186078713
  hyper
  pancreas_gallbladder vs. thyroid,non_cancer, lymphoid_neoplasm,sarcoma
cgt

SEQ ID NO: 474131 - DNA, 133 bp, Homo sapiens; identical to SEQ ID NO: 453234
  chr3:186079331-186079464
  hyper
  pancreas_gallbladder vs. thyroid,non_cancer, lymphoid_neoplasm,sarcoma

SEQ ID NO: 474132 - DNA, 291 bp, Homo sapiens; identical to SEQ ID NO: 453235
  chr3:186079331-186079622
  hyper
  pancreas_gallbladder vs. lymphoid_neoplasm, myeloid_neoplasm,thyroid

SEQ ID NO: 474133 - DNA, 56 bp, Homo sapiens; identical to SEQ ID NO: 349888
  chr3:192128140-192128196
  hyper
  pancreas_gallbladder vs. renal,ovary

SEQ ID NO: 474134 - DNA, 583 bp, Homo sapiens; identical to SEQ ID NO: 472571
  chr3:195599104-195599687
  hyper
  pancreas_gallbladder vs. liver_bileduct, bladder_and_urothelial,breast,prostate,colorectal, lymphoid_neoplasm,upper_gi,uterine

SEQ ID NO: 474135 - DNA, 174 bp, Homo sapiens; identical to SEQ ID NO: 472572
  chr3:195599513-195599687
  hyper
  pancreas_gallbladder vs. liver_bileduct, bladder_and_urothelial,breast,prostate,colorectal, multiple_myeloma,lymphoid_neoplasm,uterine,melanoma,upper_gi

SEQ ID NO: 474136 - DNA, 172 bp, Homo sapiens
  chr4:657350-657522
  hyper
  pancreas_gallbladder vs. ovary
cgtcccaagccgacgatggagccgctggtggagagctgggcaccctgaggagggccctgagcagcaggcggattaggggtcccgcccaccgagggcccgagggcgggggcgtgagaggcacaggcagccgaggcggaaggggcggggtccccgggcaccctgagaggtggcc

SEQ ID NO: 474137 - DNA, 115 bp, Homo sapiens
  chr4:657552-657667
  hyper
  pancreas_gallbladder vs. ovary
ccgcagaccctgaacatctaccagaacctgaaccggcggcagcacgagcacgtgatccacctgatggacatcgccatcatcgccacggacctggccctgtacttcaagtgcgcgc

SEQ ID NO: 474138 - DNA, 139 bp, Homo sapiens; identical to SEQ ID NO: 357804
  chr4:657712-657851
  hyper
  pancreas_gallbladder vs. ovary

SEQ ID NO: 474139 - DNA, 308 bp, Homo sapiens
  chr4:1165683-1165991
  hyper
  pancreas_gallbladder vs. upper_gi
tgcttggggaaggccgtctggctccacttgcccgtgaaggtgatgctgtatttggccagggctctggcggaacagatggactctcccccaagaggctggccggcggcgccgagagtggccaggaggagagcgcagagggccttgcccagggcggcggccgggctggggttttccatcacctgggagcacagaggggagcagccgcgcgctggcaccgtcgtggcagcctcggggtggaaagccgagagggctgcggcactttgggctctgaggacggccccgagcacccgcgaccccctccctgctcc

SEQ ID NO: 474140 - DNA, 241 bp, Homo sapiens
  chr4:1165750-1165991
  hyper
  pancreas_gallbladder vs. upper_gi
cggaacagatggactctcccccaagaggctggccggcggcgccgagagtggccaggaggagagcgcagagggccttgcccagggcggcggccgggctggggttttccatcacctgggagcacagaggggagcagccgcgcgctggcaccgtcgtggcagcctcggggtggaaagccgagagggctgcggcactttgggctctgaggacggccccgagcacccgcgaccccctccctgctcc

SEQ ID NO: 474141 - DNA, 222 bp, Homo sapiens; identical to SEQ ID NO: 357808
  chr4:1166359-1166581
  hyper
  pancreas_gallbladder vs. upper_gi

SEQ ID NO: 474142 - DNA, 219 bp, Homo sapiens
  chr4:1332660-1332879
  hyper
  pancreas_gallbladder vs. prostate,lymphoid_neoplasm, sarcoma,melanoma,liver_bileduct,bladder_and_urothelial
tagcttcgttcgaaatggatgaaggggtgggaaggacaggcgaggtggccccgggatttctttggcaggtgtgccttcgggaaggaactttgcctgagaggatgagtcattccctggtggttcattgtggggattttccatggaaatccgtgtgtacgttgtagtcgcttgccttaatgcattcccggttttatttttcagtctctgctttctatccgt

SEQ ID NO: 474143 - DNA, 219 bp, Homo sapiens; identical to SEQ ID NO: 474142
  chr4:1332660-1332879
  hyper
  pancreas_gallbladder vs. prostate,lymphoid_neoplasm, multiple_myeloma,bladder_and_urothelial,uterine,melanoma, sarcoma

SEQ ID NO: 474144 - DNA, 80 bp, Homo sapiens; identical to SEQ ID NO: 370368
  chr4:5712804-5712884
  hyper
  pancreas_gallbladder vs. lung

SEQ ID NO: 474145 - DNA, 6 bp, Homo sapiens
  chr4:5712886-5712892
  hyper
  pancreas_gallbladder vs. lung
gggtgg

SEQ ID NO: 474146 - DNA, 57 bp, Homo sapiens; identical to SEQ ID NO: 370369
  chr4:5713393-5713450
  hyper
  pancreas_gallbladder vs. lung

SEQ ID NO: 474147 - DNA, 207 bp, Homo sapiens; identical to SEQ ID NO: 467287
  chr4:6201673-6201880
  hyper
  pancreas_gallbladder vs. lung,ovary

SEQ ID NO: 474148 - DNA, 80 bp, Homo sapiens; identical to SEQ ID NO: 453239
  chr4:6201800-6201880
  hyper
  pancreas_gallbladder vs. lung,renal,ovary,breast

SEQ ID NO: 474149 - DNA, 65 bp, Homo sapiens; identical to SEQ ID NO: 346630
  chr4:6202658-6202723
  hyper
  pancreas_gallbladder vs. lung,renal,ovary,breast

SEQ ID NO: 474150 - DNA, 44 bp, Homo sapiens; identical to SEQ ID NO: 459708
  chr4:10458329-10458373
  hyper
  pancreas_gallbladder vs. anorectal,prostate,breast, sarcoma,thyroid,uterine,lung,cervical,non_cancer,head_and_neck, bladder_and_urothelial,myeloid_neoplasm

SEQ ID NO: 474151 - DNA, 25 bp, Homo sapiens
  chr4:10459327-10459352
  hyper
  pancreas_gallbladder vs. anorectal,prostate,sarcoma, breast,head_and_neck,non_cancer,uterine,lung,thyroid, bladder_and_urothelial,cervical,multiple_myeloma
gggtcccgcggagggcggccttggc

SEQ ID NO: 474152 - DNA, 29 bp, Homo sapiens
  chr4:13549864-13549893
  hyper
  pancreas_gallbladder vs. uterine,sarcoma,ovary, head_and_neck,bladder_and_urothelial,prostate
gcgatccaaaccgcctaagcatcccaagc

SEQ ID NO: 474153 - DNA, 57 bp, Homo sapiens; identical to SEQ ID NO: 454399
  chr4:15780742-15780799
  hyper
  pancreas_gallbladder vs. multiple_myeloma

SEQ ID NO: 474154 - DNA, 381 bp, Homo sapiens
  chr4:20253129-20253510
  hyper
  pancreas_gallbladder vs. liver_bileduct
cgcgtggcaaaagctgcaggagaggcactggcagggctgtttatttatgagccgcgttcaaagccgacctcttcccattctcccactgcaaacgactatctccgagcccaggtcacctctggggccaaggagttgggggctggggctcgggtggctccttcttcgggccaagtttgcccgcgcgtgggagcgagggggcgagccagggcgcacgggaacgcgcgccgccagccgccgcctccgcccagcgctggcagccccggcctcacctctcccctctccccagcgaggtgcgggctcccagagcggagccagggggcgggcctgggcctcgaggggcggggtcagggggcggaggctcgggcggctatataaggcccg

SEQ ID NO: 474155 - DNA, 38 bp, Homo sapiens
  chr4:20253975-20254013
  hyper
  pancreas_gallbladder vs. liver_bileduct
cgacctcgctccctggagcgggaggccaggaaagcagc

SEQ ID NO: 474156 - DNA, 83 bp, Homo sapiens
  chr4:20253975-20254058
  hyper
  pancreas_gallbladder vs. liver_bileduct
cgacctcgctccctggagcgggaggccaggaaagcagcgggagaggggaaggggctagaaggagaaggactacccgggactgc

SEQ ID NO: 474157 - DNA, 196 bp, Homo sapiens; identical to SEQ ID NO: 357847
  chr4:20254323-20254519
  hyper
  pancreas_gallbladder vs. liver_bileduct

SEQ ID NO: 474158 - DNA, 16 bp, Homo sapiens
  chr4:41259850-41259866
  hyper
  pancreas_gallbladder vs. ovary,cervical,lung,breast, renal
aggtgatgcggggcgc

SEQ ID NO: 474159 - DNA, 3 bp, Homo sapiens
  chr4:42155097-42155100
  hyper
  pancreas_gallbladder vs. prostate,thyroid,non_cancer, myeloid_neoplasm,ovary,uterine,renal,lymphoid_neoplasm, multiple_myeloma
gac

SEQ ID NO: 474160 - DNA, 6 bp, Homo sapiens
  chr4:57521376-57521382
  hyper
  pancreas_gallbladder vs. sarcoma,multiple_myeloma, non_cancer,myeloid_neoplasm,ovary,anorectal,uterine,thyroid, cervical,prostate,lymphoid_neoplasm,head_and_neck
cgggga

SEQ ID NO: 474161 - DNA, 94 bp, Homo sapiens; identical to SEQ ID NO: 458065
  chr4:57687545-57687639
  hyper
  pancreas_gallbladder vs. lung,ovary,colorectal, head_and_neck,anorectal,bladder_and_urothelial

SEQ ID NO: 474162 - DNA, 205 bp, Homo sapiens; identical to SEQ ID NO: 346643
  chr4:57687887-57688092
  hyper
  pancreas_gallbladder vs. lung,ovary,colorectal, head_and_neck,anorectal,bladder_and_urothelial

SEQ ID NO: 474163 - DNA, 151 bp, Homo sapiens; identical to SEQ ID NO: 357899
  chr4:81124731-81124882
  hyper
  pancreas_gallbladder vs. lung,colorectal,thyroid

SEQ ID NO: 474164 - DNA, 13 bp, Homo sapiens
  chr4:81951925-81951938
  hyper
  pancreas_gallbladder vs. lung,bladder_and_urothelial, ovary,prostate,breast,renal,non_cancer,cervical, multiple_myeloma
cgtacactaaaaa

SEQ ID NO: 474165 - DNA, 27 bp, Homo sapiens
  chr4:111533360-111533387
  hyper
  pancreas_gallbladder vs. renal
aggaggatccgggacggggaacttcgc

SEQ ID NO: 474166 - DNA, 140 bp, Homo sapiens
  chr4:111543735-111543875
  hyper
  pancreas_gallbladder vs. colorectal
caggggacgcaacccccgccgagttctcaagccaagctgcccccgtctcctccggaaggctcaagcgaaaaagtccggagacggaaagtcagcgggcaaacgaagacatgggatgtgggcagaagggcaccactcagagc

SEQ ID NO: 474167 - DNA, 233 bp, Homo sapiens; identical to SEQ ID NO: 461074
  chr4:111543735-111543968
  hyper
  pancreas_gallbladder vs. colorectal,cervical

SEQ ID NO: 474168 - DNA, 61 bp, Homo sapiens; identical to SEQ ID NO: 461075
  chr4:111543907-111543968
  hyper
  pancreas_gallbladder vs. colorectal

SEQ ID NO: 474169 - DNA, 99 bp, Homo sapiens
  chr4:113430521-113430620
  hyper
  pancreas_gallbladder vs. bladder_and_urothelial,cervical
cggtgagatgcggggccgaggaggagaaggagtgggaccgtgggcgtgcaggtgtttcaaggatcctcctcctttcccccttccatctctgattccatc

SEQ ID NO: 474170 - DNA, 352 bp, Homo sapiens; identical to SEQ ID NO: 370522
  chr4:113431158-113431510
  hyper
  pancreas_gallbladder vs. bladder_and_urothelial,cervical

SEQ ID NO: 474171 - DNA, 5 bp, Homo sapiens
  chr4:113435438-113435443
  hyper
  pancreas_gallbladder vs. sarcoma
cgaac

SEQ ID NO: 474172 - DNA, 300 bp, Homo sapiens; identical to SEQ ID NO: 462855
  chr4:113435475-113435775
  hyper
  pancreas_gallbladder vs. sarcoma

SEQ ID NO: 474173 - DNA, 243 bp, Homo sapiens; identical to SEQ ID NO: 462856
  chr4:113436585-113436828
  hyper
  pancreas_gallbladder vs. sarcoma,uterine,ovary

SEQ ID NO: 474174 - DNA, 113 bp, Homo sapiens; identical to SEQ ID NO: 462859
  chr4:113438278-113438391
  hyper
  pancreas_gallbladder vs. bladder_and_urothelial

SEQ ID NO: 474175 - DNA, 229 bp, Homo sapiens; identical to SEQ ID NO: 464557
  chr4:113438278-113438507
  hyper
  pancreas_gallbladder vs. bladder_and_urothelial,uterine

SEQ ID NO: 474176 - DNA, 157 bp, Homo sapiens; identical to SEQ ID NO: 349965
  chr4:113442552-113442709
  hyper
  pancreas_gallbladder vs. thyroid,ovary

SEQ ID NO: 474177 - DNA, 11 bp, Homo sapiens
  chr4:113443992-113444003
  hyper
  pancreas_gallbladder vs. non_cancer,myeloid_neoplasm, thyroid
cgtgtctacag

SEQ ID NO: 474178 - DNA, 81 bp, Homo sapiens; identical to SEQ ID NO: 454404
  chr4:113444864-113444945
  hyper
  pancreas_gallbladder vs. upper_gi,colorectal

SEQ ID NO: 474179 - DNA, 115 bp, Homo sapiens; identical to SEQ ID NO: 349967
  chr4:113445444-113445559
  hyper
  pancreas_gallbladder vs. upper_gi,colorectal

SEQ ID NO: 474180 - DNA, 353 bp, Homo sapiens; identical to SEQ ID NO: 458081
  chr4:141293964-141294317
  hyper
  pancreas_gallbladder vs. liver_bileduct,head_and_neck, lung,bladder_and_urothelial,colorectal,melanoma,breast, anorectal

SEQ ID NO: 474181 - DNA, 104 bp, Homo sapiens; identical to SEQ ID NO: 458082
  chr4:141294418-141294522
  hyper
  pancreas_gallbladder vs. liver_bileduct,head_and_neck, lung,bladder_and_urothelial,colorectal,melanoma,breast, anorectal

SEQ ID NO: 474182 - DNA, 89 bp, Homo sapiens; identical to SEQ ID NO: 458083
  chr4:141294545-141294634
  hyper
  pancreas_gallbladder vs. liver_bileduct,head_and_neck, lung,bladder_and_urothelial,colorectal,melanoma,breast, anorectal

SEQ ID NO: 474183 - DNA, 104 bp, Homo sapiens; identical to SEQ ID NO: 458082
  chr4:141294418-141294522
  hyper
  pancreas_gallbladder vs. liver_bileduct,lung, head_and_neck,colorectal,bladder_and_urothelial,breast,ovary, melanoma

SEQ ID NO: 474184 - DNA, 89 bp, Homo sapiens; identical to SEQ ID NO: 458083
  chr4:141294545-141294634
  hyper
  pancreas_gallbladder vs. liver_bileduct,lung, head_and_neck,colorectal,bladder_and_urothelial,breast,ovary, melanoma

SEQ ID NO: 474185 - DNA, 40 bp, Homo sapiens; identical to SEQ ID NO: 345144
  chr4:141295287-141295327
  hyper
  pancreas_gallbladder vs. liver_bileduct,lung, head_and_neck,colorectal,bladder_and_urothelial,breast,ovary, melanoma

SEQ ID NO: 474186 - DNA, 24 bp, Homo sapiens
  chr4:142053208-142053232
  hyper
  pancreas_gallbladder vs. liver_bileduct
cggaaaagttagcccgccacgttg

SEQ ID NO: 474187 - DNA, 156 bp, Homo sapiens; identical to SEQ ID NO: 467382
  chr4:165304258-165304414
  hyper
  pancreas_gallbladder vs. melanoma

SEQ ID NO: 474188 - DNA, 40 bp, Homo sapiens
  chr5:2743466-2743506
  hyper
  pancreas_gallbladder vs. upper_gi
cgggcgcgggaggcagcgcccgcgccggccgccgggcaag

SEQ ID NO: 474189 - DNA, 5 bp, Homo sapiens
  chr5:2743744-2743749
  hyper
  pancreas_gallbladder vs. upper_gi
tcccc

SEQ ID NO: 474190 - DNA, 174 bp, Homo sapiens; identical to SEQ ID NO: 358059
  chr5:2753572-2753746
  hyper
  pancreas_gallbladder vs. upper_gi

SEQ ID NO: 474191 - DNA, 10 bp, Homo sapiens
  chr5:6449618-6449628
  hyper
  pancreas_gallbladder vs. sarcoma,head_and_neck,uterine, prostate,anorectal,bladder_and_urothelial,breast, multiple_myeloma,ovary,thyroid,cervical
ggtctctgcc

SEQ ID NO: 474192 - DNA, 33 bp, Homo sapiens; identical to SEQ ID NO: 456013
  chr5:6583144-6583177
  hyper
  pancreas_gallbladder vs. anorectal

SEQ ID NO: 474193 - DNA, 25 bp, Homo sapiens
  chr5:6583754-6583779
  hyper
  pancreas_gallbladder vs. anorectal
tgagagccaccgggctgcggtgcgc

SEQ ID NO: 474194 - DNA, 377 bp, Homo sapiens
  chr5:9545120-9545497
  hyper
  pancreas_gallbladder vs. liver_bileduct
gttccccaggcctctgcatcccccgccttagtgtctttcattaaccaaggcgcttggcggagttgagcccaagtcccattgcctcccggttcccctgtaaggaaagcaggaaaacctgcccaagccggtggggctgcgaggtggccgctcccgaaccgccaagtcccgacctccgtgtcccctgcccccggctcgcggcagtgcgagcctggaggcgcgccgggggcgggcacagaccagtgtgcgcacctttccgggtgttgggcaggggtcccgtctcgcccaccgcgacactccggctccttacctctccatgctcagacctcggcacaggcgggtacacaaacttccagcccgtgcactagctcaactgtggg

SEQ ID NO: 474195 - DNA, 85 bp, Homo sapiens; identical to SEQ ID NO: 358065
  chr5:9545851-9545936
  hyper
  pancreas_gallbladder vs. liver_bileduct

SEQ ID NO: 474196 - DNA, 171 bp, Homo sapiens; identical to SEQ ID NO: 456015
  chr5:10564301-10564472
  hyper
  pancreas_gallbladder vs. lymphoid_neoplasm, myeloid_neoplasm,cervical,renal,thyroid,non_cancer,ovary, sarcoma,head_and_neck,bladder_and_urothelial,uterine,anorectal, multiple_myeloma

SEQ ID NO: 474197 - DNA, 147 bp, Homo sapiens; identical to SEQ ID NO: 350041
  chr5:11385588-11385735
  hyper
  pancreas_gallbladder vs. breast,ovary,prostate

SEQ ID NO: 474198 - DNA, 42 bp, Homo sapiens
  chr5:15500076-15500118
  hyper
  pancreas_gallbladder vs. anorectal
cgttgcttcgctccgaagggttcgcgcgtagcgcgctgagcc

SEQ ID NO: 474199 - DNA, 303 bp, Homo sapiens; identical to SEQ ID NO: 462872
  chr5:17216361-17216664
  hyper
  pancreas_gallbladder vs. bladder_and_urothelial,uterine, breast,lymphoid_neoplasm

SEQ ID NO: 474200 - DNA, 4 bp, Homo sapiens
  chr5:17217138-17217142
  hyper
  pancreas_gallbladder vs. bladder_and_urothelial,uterine, breast,lymphoid_neoplasm
caac

SEQ ID NO: 474201 - DNA, 53 bp, Homo sapiens; identical to SEQ ID NO: 462874
  chr5:17217629-17217682
  hyper
  pancreas_gallbladder vs. lung,anorectal, bladder_and_urothelial,lymphoid_neoplasm,uterine,breast,sarcoma, prostate

SEQ ID NO: 474202 - DNA, 99 bp, Homo sapiens; identical to SEQ ID NO: 453281
  chr5:42950747-42950846
  hyper
  pancreas_gallbladder vs. sarcoma,multiple_myeloma, non_cancer,myeloid_neoplasm,thyroid

SEQ ID NO: 474203 - DNA, 3 bp, Homo sapiens
  chr5:42993305-42993308
  hyper
  pancreas_gallbladder vs. colorectal
cgc

SEQ ID NO: 474204 - DNA, 338 bp, Homo sapiens; identical to SEQ ID NO: 456022
  chr5:43007481-43007819
  hyper
  pancreas_gallbladder vs. colorectal,upper_gi, head_and_neck

SEQ ID NO: 474205 - DNA, 48 bp, Homo sapiens; identical to SEQ ID NO: 456023
  chr5:43007771-43007819
  hyper
  pancreas_gallbladder vs. colorectal, bladder_and_urothelial,head_and_neck,upper_gi,cervical

SEQ ID NO: 474206 - DNA, 2 bp, Homo sapiens
  chr5:43008736-43008738
  hyper
  pancreas_gallbladder vs. colorectal,upper_gi
cg

SEQ ID NO: 474207 - DNA, 388 bp, Homo sapiens; identical to SEQ ID NO: 456025
  chr5:43017314-43017702
  hyper
  pancreas_gallbladder vs. colorectal,cervical,anorectal, lymphoid_neoplasm,multiple_myeloma,uterine,non_cancer, head_and_neck,myeloid_neoplasm

SEQ ID NO: 474208 - DNA, 304 bp, Homo sapiens; identical to SEQ ID NO: 456026
  chr5:43019347-43019651
  hyper
  pancreas_gallbladder vs. colorectal,cervical

SEQ ID NO: 474209 - DNA, 304 bp, Homo sapiens; identical to SEQ ID NO: 456026
  chr5:43019347-43019651
  hyper
  pancreas_gallbladder vs. upper_gi

SEQ ID NO: 474210 - DNA, 260 bp, Homo sapiens; identical to SEQ ID NO: 456028
  chr5:43019887-43020147
  hyper
  pancreas_gallbladder vs. upper_gi

SEQ ID NO: 474211 - DNA, 9 bp, Homo sapiens
  chr5:43020294-43020303
  hyper
  pancreas_gallbladder vs. upper_gi
agccctagc

SEQ ID NO: 474212 - DNA, 76 bp, Homo sapiens; identical to SEQ ID NO: 454408
  chr5:54518558-54518634
  hyper
  pancreas_gallbladder vs. multiple_myeloma, myeloid_neoplasm,non_cancer,renal

SEQ ID NO: 474213 - DNA, 270 bp, Homo sapiens; identical to SEQ ID NO: 464589
  chr5:72594501-72594771
  hyper
  pancreas_gallbladder vs. anorectal

SEQ ID NO: 474214 - DNA, 199 bp, Homo sapiens; identical to SEQ ID NO: 370767
  chr5:76936815-76937014
  hyper
  pancreas_gallbladder vs. colorectal

SEQ ID NO: 474215 - DNA, 51 bp, Homo sapiens
  chr5:76937347-76937398
  hyper
  pancreas_gallbladder vs. colorectal
cgccgccagcaggcagagcgagaaaaacgacaatagcctggatgtaaaaag

SEQ ID NO: 474216 - DNA, 3 bp, Homo sapiens
  chr5:77147514-77147517
  hyper
  pancreas_gallbladder vs. ovary,uterine
cgc

SEQ ID NO: 474217 - DNA, 23 bp, Homo sapiens
  chr5:77148195-77148218
  hyper
  pancreas_gallbladder vs. ovary,uterine
gtttctgcaattatggcttaaac

SEQ ID NO: 474218 - DNA, 192 bp, Homo sapiens; identical to SEQ ID NO: 453297
  chr5:77148195-77148387
  hyper
  pancreas_gallbladder vs. sarcoma,uterine,ovary, non_cancer,lymphoid_neoplasm,multiple_myeloma

SEQ ID NO: 474219 - DNA, 38 bp, Homo sapiens; identical to SEQ ID NO: 456033
  chr5:77268330-77268368
  hyper
  pancreas_gallbladder vs. ovary,myeloid_neoplasm,thyroid

SEQ ID NO: 474220 - DNA, 15 bp, Homo sapiens
  chr5:77269447-77269462
  hyper
  pancreas_gallbladder vs. multiple_myeloma
ttccccgcggggctc

SEQ ID NO: 474221 - DNA, 123 bp, Homo sapiens
  chr5:83679447-83679570
  hyper
  pancreas_gallbladder vs. lung
cgcagctaagctccaggcccctggggtcagactaggagaggcgggttcctggggtttgctgtaatcgatgctgctcctctgggatggggaggcaggagaaagctgaagtgacctgtgagactc

SEQ ID NO: 474222 - DNA, 75 bp, Homo sapiens; identical to SEQ ID NO: 370783
  chr5:83680369-83680444
  hyper
  pancreas_gallbladder vs. lung

SEQ ID NO: 474223 - DNA, 80 bp, Homo sapiens; identical to SEQ ID NO: 345180
  chr5:87957200-87957280
  hyper
  pancreas_gallbladder vs. prostate,melanoma,uterine, myeloid_neoplasm,breast,non_cancer,lung,ovary,renal,thyroid

SEQ ID NO: 474224 - DNA, 157 bp, Homo sapiens; identical to SEQ ID NO: 453301
  chr5:87969885-87970042
  hyper
  pancreas_gallbladder vs. uterine,sarcoma,thyroid, non_cancer,ovary,breast,multiple_myeloma,myeloid_neoplasm, prostate

SEQ ID NO: 474225 - DNA, 317 bp, Homo sapiens; identical to SEQ ID NO: 453302
  chr5:87970918-87971235
  hyper
  pancreas_gallbladder vs. uterine,sarcoma,thyroid, myeloid_neoplasm,non_cancer,breast,ovary,multiple_myeloma

SEQ ID NO: 474226 - DNA, 600 bp, Homo sapiens; identical to SEQ ID NO: 453303
  chr5:87970918-87971518
  hyper
  pancreas_gallbladder vs. uterine,myeloid_neoplasm

SEQ ID NO: 474227 - DNA, 22 bp, Homo sapiens
  chr5:92906252-92906274
  hyper
  pancreas_gallbladder vs. thyroid
cgccaactgcccgcgcggaacc

SEQ ID NO: 474228 - DNA, 115 bp, Homo sapiens; identical to SEQ ID NO: 453314
  chr5:100236036-100236151
  hyper
  pancreas_gallbladder vs. lung,lymphoid_neoplasm, bladder_and_urothelial,sarcoma,renal,ovary,multiple_myeloma, breast,myeloid_neoplasm,thyroid

SEQ ID NO: 474229 - DNA, 87 bp, Homo sapiens; identical to SEQ ID NO: 453315
  chr5:100238197-100238284
  hyper
  pancreas_gallbladder vs. lung,renal,lymphoid_neoplasm, multiple_myeloma,thyroid,bladder_and_urothelial,prostate, myeloid_neoplasm,non_cancer,sarcoma,ovary

SEQ ID NO: 474230 - DNA, 345 bp, Homo sapiens; identical to SEQ ID NO: 453316
  chr5:100239724-100240069
  hyper
  pancreas_gallbladder vs. lymphoid_neoplasm,renal, bladder_and_urothelial,sarcoma,lung,multiple_myeloma,thyroid, non_cancer,ovary,myeloid_neoplasm,prostate

SEQ ID NO: 474231 - DNA, 83 bp, Homo sapiens
  chr5:127537002-127537085
  hyper
  pancreas_gallbladder vs. lung,bladder_and_urothelial, head_and_neck,cervical
cgataagagggaagcgaagaaaaaagcacgtgacttgaaaatgtttttctctttttaaagccacatctttctgcttcattttg

SEQ ID NO: 474232 - DNA, 65 bp, Homo sapiens; identical to SEQ ID NO: 350159
  chr5:127537230-127537295
  hyper
  pancreas_gallbladder vs. lung,bladder_and_urothelial, head_and_neck,cervical

SEQ ID NO: 474233 - DNA, 27 bp, Homo sapiens
  chr5:127872819-127872846
  hyper
  pancreas_gallbladder vs. melanoma
cgcccaacccccggagagagggctttc

SEQ ID NO: 474234 - DNA, 156 bp, Homo sapiens; identical to SEQ ID NO: 454425
  chr5:141931151-141931307
  hyper
  pancreas_gallbladder vs. colorectal

SEQ ID NO: 474235 - DNA, 11 bp, Homo sapiens
  chr5:141931539-141931550
  hyper
  pancreas_gallbladder vs. colorectal
ccctcccctcc

SEQ ID NO: 474236 - DNA, 3 bp, Homo sapiens
  chr5:145713896-145713899
  hyper
ttc

SEQ ID NO: 474237 - DNA, 177 bp, Homo sapiens
  chr5:155107908-155108085
  hyper
  pancreas_gallbladder vs. breast
cgccctccatgctgcgggagctgcggccgccttccgctcagcctctggtcccaggcgagcctggcgagccggcgaagcaccggcggggaggaggactagaacaggaggaggggcacggcggattgaagcgagctgggctgtgagcaagggacacccacagcctggagaaacagcccc

SEQ ID NO: 474238 - DNA, 231 bp, Homo sapiens; identical to SEQ ID NO: 358303
  chr5:159414348-159414579
  hyper
  pancreas_gallbladder vs. upper_gi

SEQ ID NO: 474239 - DNA, 97 bp, Homo sapiens; identical to SEQ ID NO: 467497
  chr5:168727259-168727356
  hyper
  pancreas_gallbladder vs. liver_bileduct,anorectal

SEQ ID NO: 474240 - DNA, 13 bp, Homo sapiens
  chr5:169063996-169064009
  hyper
  pancreas_gallbladder vs. bladder_and_urothelial, multiple_myeloma,lymphoid_neoplasm,myeloid_neoplasm,non_cancer
cggcaatcaggaa

SEQ ID NO: 474241 - DNA, 210 bp, Homo sapiens; identical to SEQ ID NO: 458169
  chr5:176057164-176057374
  hyper
  pancreas_gallbladder vs. head_and_neck,ovary,uterine

SEQ ID NO: 474242 - DNA, 117 bp, Homo sapiens; identical to SEQ ID NO: 459759
  chr5:178016455-178016572
  hyper
  pancreas_gallbladder vs. bladder_and_urothelial, anorectal,cervical,ovary,uterine

SEQ ID NO: 474243 - DNA, 13 bp, Homo sapiens
  chr5:178017936-178017949
  hyper
  pancreas_gallbladder vs. bladder_and_urothelial
cggacttcggtgc

SEQ ID NO: 474244 - DNA, 184 bp, Homo sapiens; identical to SEQ ID NO: 358338
  chr5:178594471-178594655
  hyper
  pancreas_gallbladder vs. upper_gi,anorectal,ovary

SEQ ID NO: 474245 - DNA, 289 bp, Homo sapiens; identical to SEQ ID NO: 459760
  chr5:178770455-178770744
  hyper
  pancreas_gallbladder vs. bladder_and_urothelial

SEQ ID NO: 474246 - DNA, 197 bp, Homo sapiens; identical to SEQ ID NO: 467521
  chr5:179779452-179779649
  hyper
  pancreas_gallbladder vs. lung

SEQ ID NO: 474247 - DNA, 29 bp, Homo sapiens
  chr5:179867621-179867650
  hyper
  pancreas_gallbladder vs. upper_gi
gagaattaagaagcacaacacccagatac

SEQ ID NO: 474248 - DNA, 61 bp, Homo sapiens; identical to SEQ ID NO: 453345
  chr6:391113-391174
  hyper
  pancreas_gallbladder vs. lymphoid_neoplasm,thyroid, non_cancer,multiple_myeloma,prostate,myeloid_neoplasm,renal

SEQ ID NO: 474249 - DNA, 55 bp, Homo sapiens; identical to SEQ ID NO: 346767
  chr6:393764-393819
  hyper
  pancreas_gallbladder vs. lymphoid_neoplasm, myeloid_neoplasm,melanoma,non_cancer,thyroid,multiple_myeloma, sarcoma,prostate

SEQ ID NO: 474250 - DNA, 394 bp, Homo sapiens; identical to SEQ ID NO: 469266
  chr6:710660-711054
  hyper
  pancreas_gallbladder vs. upper_gi,cervical, bladder_and_urothelial,colorectal

SEQ ID NO: 474251 - DNA, 141 bp, Homo sapiens; identical to SEQ ID NO: 346769
  chr6:711310-711451
  hyper
  pancreas_gallbladder vs. upper_gi,cervical, bladder_and_urothelial,colorectal

SEQ ID NO: 474252 - DNA, 166 bp, Homo sapiens; identical to SEQ ID NO: 462939
  chr6:1624812-1624978
  hyper
  pancreas_gallbladder vs. bladder_and_urothelial, head_and_neck

SEQ ID NO: 474253 - DNA, 52 bp, Homo sapiens; identical to SEQ ID NO: 459763
  chr6:1625068-1625120
  hyper
  pancreas_gallbladder vs. bladder_and_urothelial, head_and_neck

SEQ ID NO: 474254 - DNA, 52 bp, Homo sapiens; identical to SEQ ID NO: 459763
  chr6:1625068-1625120
  hyper
  pancreas_gallbladder vs. sarcoma,renal,anorectal, bladder_and_urothelial,head_and_neck

SEQ ID NO: 474255 - DNA, 80 bp, Homo sapiens; identical to SEQ ID NO: 350268
  chr6:6009552-6009632
  hyper
  pancreas_gallbladder vs. colorectal

SEQ ID NO: 474256 - DNA, 2 bp, Homo sapiens
  chr6:10417835-10417837
  hyper
  pancreas_gallbladder vs. cervical,breast
cg

SEQ ID NO: 474257 - DNA, 227 bp, Homo sapiens; identical to SEQ ID NO: 345207
  chr6:10417842-10418069
  hyper
  pancreas_gallbladder vs. cervical,breast

SEQ ID NO: 474258 - DNA, 5 bp, Homo sapiens
  chr6:26188711-26188716
  hyper
  pancreas_gallbladder vs. upper_gi
cgttt

SEQ ID NO: 474259 - DNA, 4 bp, Homo sapiens
  chr6:26197269-26197273
  hyper
  pancreas_gallbladder vs. upper_gi,cervical,colorectal
cgct

SEQ ID NO: 474260 - DNA, 327 bp, Homo sapiens; identical to SEQ ID NO: 350294
  chr6:26197520-26197847
  hyper
  pancreas_gallbladder vs. upper_gi,cervical,colorectal

SEQ ID NO: 474261 - DNA, 87 bp, Homo sapiens
  chr6:26198488-26198575
  hyper
  pancreas_gallbladder vs. upper_gi,liver_bileduct
cgagccgctgcattgatcgatttaaattacatgtgacataaagtctctttgcattttaattagtttgcttttttgggtttttgtttg

SEQ ID NO: 474262 - DNA, 2 bp, Homo sapiens
  chr6:26198599-26198601
  hyper
  pancreas_gallbladder vs. upper_gi,liver_bileduct
cc

SEQ ID NO: 474263 - DNA, 2 bp, Homo sapiens
  chr6:26198838-26198840
  hyper
  pancreas_gallbladder vs. liver_bileduct,upper_gi, bladder_and_urothelial,cervical,colorectal,melanoma, head_and_neck,anorectal,uterine,prostate,breast,non_cancer, lymphoid_neoplasm
cg

SEQ ID NO: 474264 - DNA, 214 bp, Homo sapiens; identical to SEQ ID NO: 464663
  chr6:26198924-26199138
  hyper
  pancreas_gallbladder vs. liver_bileduct,upper_gi, bladder_and_urothelial,cervical,colorectal,melanoma, head_and_neck,anorectal,uterine,prostate,breast,non_cancer, lymphoid_neoplasm

SEQ ID NO: 474265 - DNA, 16 bp, Homo sapiens
  chr6:26199167-26199183
  hyper
  pancreas_gallbladder vs. liver_bileduct,upper_gi, bladder_and_urothelial,cervical,colorectal,melanoma, head_and_neck,anorectal,uterine,prostate,breast,non_cancer, lymphoid_neoplasm
tgactttacccagcaa

SEQ ID NO: 474266 - DNA, 16 bp, Homo sapiens
  chr6:26199167-26199183
  hyper
  pancreas_gallbladder vs. liver_bileduct,upper_gi, bladder_and_urothelial,cervical,colorectal,head_and_neck, melanoma,anorectal,uterine,prostate,breast,non_cancer, lymphoid_neoplasm
tgactttacccagcaa

SEQ ID NO: 474267 - DNA, 2 bp, Homo sapiens
  chr6:26199878-26199880
  hyper
  pancreas_gallbladder vs. liver_bileduct,upper_gi, bladder_and_urothelial,cervical,colorectal,head_and_neck, melanoma,anorectal,uterine,prostate,breast,non_cancer, lymphoid_neoplasm
gc

SEQ ID NO: 474268 - DNA, 368 bp, Homo sapiens; identical to SEQ ID NO: 464667
  chr6:26204318-26204686
  hyper
  pancreas_gallbladder vs. liver_bileduct,upper_gi, colorectal,cervical,bladder_and_urothelial,head_and_neck, uterine,prostate,breast,melanoma,non_cancer,ovary, myeloid_neoplasm,thyroid,multiple_myeloma,sarcoma

SEQ ID NO: 474269 - DNA, 205 bp, Homo sapiens; identical to SEQ ID NO: 464668
  chr6:26205298-26205503
  hyper
  pancreas_gallbladder vs. upper_gi,colorectal,cervical, liver_bileduct,uterine,head_and_neck,bladder_and_urothelial, prostate,breast,melanoma,non_cancer,myeloid_neoplasm,ovary, thyroid,multiple_myeloma

SEQ ID NO: 474270 - DNA, 55 bp, Homo sapiens; identical to SEQ ID NO: 345214
  chr6:26205712-26205767
  hyper
  pancreas_gallbladder vs. upper_gi,colorectal,cervical, liver_bileduct,uterine,head_and_neck,bladder_and_urothelial, prostate,breast,melanoma,non_cancer,myeloid_neoplasm,ovary, thyroid,multiple_myeloma

SEQ ID NO: 474271 - DNA, 42 bp, Homo sapiens; identical to SEQ ID NO: 332688
  chr6:26206006-26206048
  hyper
  pancreas_gallbladder vs. upper_gi

SEQ ID NO: 474272 - DNA, 172 bp, Homo sapiens; identical to SEQ ID NO: 469304
  chr6:26215876-26216048
  hyper
  pancreas_gallbladder vs. upper_gi,colorectal

SEQ ID NO: 474273 - DNA, 11 bp, Homo sapiens
  chr6:26216380-26216391
  hyper
  pancreas_gallbladder vs. upper_gi,cervical,colorectal
cggaaaaatta

SEQ ID NO: 474274 - DNA, 6 bp, Homo sapiens
  chr6:26216805-26216811
  hyper
  pancreas_gallbladder vs. upper_gi,liver_bileduct, colorectal,head_and_neck,cervical,uterine
cgcctt

SEQ ID NO: 474275 - DNA, 224 bp, Homo sapiens; identical to SEQ ID NO: 453355
  chr6:26216853-26217077
  hyper
  pancreas_gallbladder vs. upper_gi,liver_bileduct, colorectal,head_and_neck,cervical,uterine

SEQ ID NO: 474276 - DNA, 210 bp, Homo sapiens; identical to SEQ ID NO: 453356
  chr6:26217156-26217366
  hyper
  pancreas_gallbladder vs. upper_gi,liver_bileduct, colorectal,head_and_neck,cervical,uterine

SEQ ID NO: 474277 - DNA, 210 bp, Homo sapiens; identical to SEQ ID NO: 453356
  chr6:26217156-26217366
  hyper
  pancreas_gallbladder vs. upper_gi,liver_bileduct, colorectal,cervical,head_and_neck,uterine

SEQ ID NO: 474278 - DNA, 312 bp, Homo sapiens; identical to SEQ ID NO: 345216
  chr6:26217578-26217890
  hyper
  pancreas_gallbladder vs. upper_gi,liver_bileduct, colorectal,cervical,head_and_neck,uterine

SEQ ID NO: 474279 - DNA, 14 bp, Homo sapiens
  chr6:26249947-26249961
  hyper
  pancreas_gallbladder vs. upper_gi,anorectal, head_and_neck,lymphoid_neoplasm,cervical,uterine,non_cancer, colorectal,multiple_myeloma
cgctgtcacccatg

SEQ ID NO: 474280 - DNA, 113 bp, Homo sapiens; identical to SEQ ID NO: 346790
  chr6:26250001-26250114
  hyper
  pancreas_gallbladder vs. upper_gi,anorectal, head_and_neck,lymphoid_neoplasm,cervical,uterine,non_cancer, colorectal,multiple_myeloma

SEQ ID NO: 474281 - DNA, 1 bp, Homo sapiens
  chr6:26250181-26250182
  hyper
  pancreas_gallbladder vs. anorectal,multiple_myeloma, head_and_neck,uterine,upper_gi,non_cancer,myeloid_neoplasm, thyroid,cervical,colorectal,breast,lymphoid_neoplasm,prostate, bladder_and_urothelial,ovary,renal
c

SEQ ID NO: 474282 - DNA, 26 bp, Homo sapiens
  chr6:26251515-26251541
  hyper
  pancreas_gallbladder vs. upper_gi,cervical,anorectal
cggaagctgcaatttggtaggaaact

SEQ ID NO: 474283 - DNA, 130 bp, Homo sapiens; identical to SEQ ID NO: 454440
  chr6:26271217-26271347
  hyper
  pancreas_gallbladder vs. thyroid,myeloid_neoplasm, non_cancer,cervical,upper_gi,anorectal,multiple_myeloma, colorectal,lymphoid_neoplasm,head_and_neck,uterine

SEQ ID NO: 474284 - DNA, 327 bp, Homo sapiens; identical to SEQ ID NO: 454441
  chr6:26272105-26272432
  hyper
  pancreas_gallbladder vs. anorectal,cervical, myeloid_neoplasm,thyroid,non_cancer,upper_gi,colorectal, multiple_myeloma,lymphoid_neoplasm

SEQ ID NO: 474285 - DNA, 327 bp, Homo sapiens; identical to SEQ ID NO: 454441
  chr6:26272105-26272432
  hyper
  pancreas_gallbladder vs. upper_gi,cervical

SEQ ID NO: 474286 - DNA, 62 bp, Homo sapiens; identical to SEQ ID NO: 462951
  chr6:26272853-26272915
  hyper
  pancreas_gallbladder vs. upper_gi,cervical

SEQ ID NO: 474287 - DNA, 228 bp, Homo sapiens; identical to SEQ ID NO: 462952
  chr6:26272853-26273081
  hyper
  pancreas_gallbladder vs. upper_gi,cervical

SEQ ID NO: 474288 - DNA, 210 bp, Homo sapiens; identical to SEQ ID NO: 453361
  chr6:26322359-26322569
  hyper
  pancreas_gallbladder vs. upper_gi

SEQ ID NO: 474289 - DNA, 205 bp, Homo sapiens; identical to SEQ ID NO: 453371
  chr6:27560506-27560711
  hyper
  pancreas_gallbladder vs. upper_gi

SEQ ID NO: 474290 - DNA, 61 bp, Homo sapiens
  chr6:27635798-27635859
  hyper
  pancreas_gallbladder vs. upper_gi
cgccgattacatcagtgcttatgtttgtgacttcagagacactgagaaggcgcggctcttt

SEQ ID NO: 474291 - DNA, 19 bp, Homo sapiens
  chr6:27636317-27636336
  hyper
  pancreas_gallbladder vs. upper_gi
cgaatttatatatggtttc

SEQ ID NO: 474292 - DNA, 93 bp, Homo sapiens; identical to SEQ ID NO: 453373
  chr6:27636531-27636624
  hyper
  pancreas_gallbladder vs. upper_gi

SEQ ID NO: 474293 - DNA, 351 bp, Homo sapiens; identical to SEQ ID NO: 346802
  chr6:27798705-27799056
  hyper
  pancreas_gallbladder vs. upper_gi,colorectal,cervical

SEQ ID NO: 474294 - DNA, 315 bp, Homo sapiens; identical to SEQ ID NO: 453378
  chr6:28456978-28457293
  hyper
  pancreas_gallbladder vs. multiple_myeloma

SEQ ID NO: 474295 - DNA, 209 bp, Homo sapiens; identical to SEQ ID NO: 453379
  chr6:28457345-28457554
  hyper
  pancreas_gallbladder vs. multiple_myeloma

SEQ ID NO: 474296 - DNA, 194 bp, Homo sapiens; identical to SEQ ID NO: 456076
  chr6:50808438-50808632
  hyper
  pancreas_gallbladder vs. colorectal

SEQ ID NO: 474297 - DNA, 249 bp, Homo sapiens; identical to SEQ ID NO: 456079
  chr6:56818408-56818657
  hyper
  pancreas_gallbladder vs. cervical,anorectal,renal

SEQ ID NO: 474298 - DNA, 620 bp, Homo sapiens; identical to SEQ ID NO: 332826
  chr6:57036954-57037574
  hyper
  pancreas_gallbladder vs. upper_gi

SEQ ID NO: 474299 - DNA, 227 bp, Homo sapiens; identical to SEQ ID NO: 453389
  chr6:72596315-72596542
  hyper
  pancreas_gallbladder vs. lung,uterine,breast, liver_bileduct,sarcoma,prostate,myeloid_neoplasm,thyroid, multiple_myeloma,non_cancer,renal

SEQ ID NO: 474300 - DNA, 207 bp, Homo sapiens; identical to SEQ ID NO: 453390
  chr6:72596335-72596542
  hyper
  pancreas_gallbladder vs. lung,prostate

SEQ ID NO: 474301 - DNA, 9 bp, Homo sapiens
  chr6:73333099-73333108
  hyper
  pancreas_gallbladder vs. head_and_neck,lung,breast, anorectal,lymphoid_neoplasm,thyroid
ttgtggcgc

SEQ ID NO: 474302 - DNA, 372 bp, Homo sapiens; identical to SEQ ID NO: 346840
  chr6:91005702-91006074
  hyper
  pancreas_gallbladder vs. head_and_neck,anorectal, cervical,lymphoid_neoplasm

SEQ ID NO: 474303 - DNA, 42 bp, Homo sapiens; identical to SEQ ID NO: 459786
  chr6:91320244-91320286
  hyper
  pancreas_gallbladder vs. bladder_and_urothelial,sarcoma

SEQ ID NO: 474304 - DNA, 59 bp, Homo sapiens; identical to SEQ ID NO: 358615
  chr6:105389710-105389769
  hyper
  pancreas_gallbladder vs. bladder_and_urothelial

SEQ ID NO: 474305 - DNA, 440 bp, Homo sapiens; identical to SEQ ID NO: 453397
  chr6:127836226-127836666
  hyper
  pancreas_gallbladder vs. lung

SEQ ID NO: 474306 - DNA, 225 bp, Homo sapiens; identical to SEQ ID NO: 453398
  chr6:127836441-127836666
  hyper
  pancreas_gallbladder vs. lung

SEQ ID NO: 474307 - DNA, 31 bp, Homo sapiens; identical to SEQ ID NO: 350458
  chr6:127837749-127837780
  hyper
  pancreas_gallbladder vs. lung

SEQ ID NO: 474308 - DNA, 41 bp, Homo sapiens; identical to SEQ ID NO: 346866
  chr6:159591277-159591318
  hyper
  pancreas_gallbladder vs. sarcoma,prostate,lung, myeloid_neoplasm,thyroid

SEQ ID NO: 474309 - DNA, 20 bp, Homo sapiens
  chr7:1408460-1408480
  hyper
  pancreas_gallbladder vs. anorectal,breast,uterine
cgggctctcagccaaccagc

SEQ ID NO: 474310 - DNA, 234 bp, Homo sapiens
  chr7:1705153-1705387
  hyper
  pancreas_gallbladder vs. sarcoma,lung
agcggggcgggccaggaggagggggcgaggccgccactcggcttcccacgccgcccccgcggctggctccaacttcccctccggagcccccctccggccaccccccagcccaccgacgtgcgggcagcgaccccgccccccgcccctccggtcgcccccgccgcggcccccgccccctccccatccctccccgcgcgctctcccacatgaaaccttccatcacgctcagaaaga

SEQ ID NO: 474311 - DNA, 60 bp, Homo sapiens
  chr7:1705693-1705753
  hyper
  pancreas_gallbladder vs. sarcoma,lung
aggaggaaggaggggaagccgccgccgccgccgccgcgctcggggaaccggggtgcgcgc

SEQ ID NO: 474312 - DNA, 121 bp, Homo sapiens; identical to SEQ ID NO: 459812
  chr7:1705266-1705387
  hyper
  pancreas_gallbladder vs. sarcoma

SEQ ID NO: 474313 - DNA, 503 bp, Homo sapiens; identical to SEQ ID NO: 459813
  chr7:1705693-1706196
  hyper
  pancreas_gallbladder vs. sarcoma

SEQ ID NO: 474314 - DNA, 62 bp, Homo sapiens; identical to SEQ ID NO: 463000
  chr7:6570393-6570455
  hyper
  pancreas_gallbladder vs. uterine,ovary

SEQ ID NO: 474315 - DNA, 60 bp, Homo sapiens; identical to SEQ ID NO: 454474
  chr7:19156644-19156704
  hyper
  pancreas_gallbladder vs. sarcoma,melanoma,prostate,ovary, uterine,anorectal,head_and_neck,multiple_myeloma,breast, myeloid_neoplasm,non_cancer,thyroid,cervical,lung

SEQ ID NO: 474316 - DNA, 60 bp, Homo sapiens; identical to SEQ ID NO: 454474
  chr7:19156644-19156704
  hyper
  pancreas_gallbladder vs. anorectal,uterine,sarcoma, breast,head_and_neck,prostate,myeloid_neoplasm,ovary,non_cancer, thyroid,multiple_myeloma

SEQ ID NO: 474317 - DNA, 120 bp, Homo sapiens; identical to SEQ ID NO: 467629
  chr7:20825260-20825380
  hyper
  pancreas_gallbladder vs. colorectal

SEQ ID NO: 474318 - DNA, 16 bp, Homo sapiens
  chr7:20826098-20826114
  hyper
  pancreas_gallbladder vs. colorectal
cgaaatcggtgcctgt

SEQ ID NO: 474319 - DNA, 298 bp, Homo sapiens; identical to SEQ ID NO: 467631
  chr7:20826202-20826500
  hyper
  pancreas_gallbladder vs. colorectal

SEQ ID NO: 474320 - DNA, 11 bp, Homo sapiens
  chr7:20826838-20826849
  hyper
  pancreas_gallbladder vs. colorectal
gtggtaaaggc

SEQ ID NO: 474321 - DNA, 61 bp, Homo sapiens; identical to SEQ ID NO: 453412
  chr7:20827463-20827524
  hyper
  pancreas_gallbladder vs. colorectal

SEQ ID NO: 474322 - DNA, 79 bp, Homo sapiens; identical to SEQ ID NO: 371463
  chr7:20827557-20827636
  hyper
  pancreas_gallbladder vs. colorectal

SEQ ID NO: 474323 - DNA, 42 bp, Homo sapiens; identical to SEQ ID NO: 464747
  chr7:20830567-20830609
  hyper
  pancreas_gallbladder vs. colorectal

SEQ ID NO: 474324 - DNA, 147 bp, Homo sapiens; identical to SEQ ID NO: 358767
  chr7:20836997-20837144
  hyper
  pancreas_gallbladder vs. upper_gi

SEQ ID NO: 474325 - DNA, 107 bp, Homo sapiens; identical to SEQ ID NO: 346884
  chr7:23287654-23287761
  hyper
  pancreas_gallbladder vs. melanoma,myeloid_neoplasm, cervical,sarcoma

SEQ ID NO: 474326 - DNA, 196 bp, Homo sapiens; identical to SEQ ID NO: 456123
  chr7:25896938-25897134
  hyper
  pancreas_gallbladder vs. anorectal,colorectal,sarcoma, prostate,renal,myeloid_neoplasm,non_cancer,head_and_neck, cervical,ovary,thyroid

SEQ ID NO: 474327 - DNA, 109 bp, Homo sapiens; identical to SEQ ID NO: 345266
  chr7:25897246-25897355
  hyper
  pancreas_gallbladder vs. anorectal,colorectal,sarcoma, prostate,renal,myeloid_neoplasm,non_cancer,head_and_neck, cervical,ovary,thyroid

SEQ ID NO: 474328 - DNA, 296 bp, Homo sapiens; identical to SEQ ID NO: 458249
  chr7:25901811-25902107
  hyper
  pancreas_gallbladder vs. colorectal,upper_gi

SEQ ID NO: 474329 - DNA, 208 bp, Homo sapiens; identical to SEQ ID NO: 458250
  chr7:25902138-25902346
  hyper
  pancreas_gallbladder vs. colorectal,upper_gi

SEQ ID NO: 474330 - DNA, 91 bp, Homo sapiens; identical to SEQ ID NO: 456128
  chr7:27135176-27135267
  hyper
  pancreas_gallbladder vs. head_and_neck,renal,prostate, multiple_myeloma,bladder_and_urothelial,thyroid,non_cancer, anorectal,lymphoid_neoplasm,cervical,myeloid_neoplasm,uterine, upper_gi,ovary,colorectal,melanoma

SEQ ID NO: 474331 - DNA, 142 bp, Homo sapiens; identical to SEQ ID NO: 345270
  chr7:27136790-27136932
  hyper
  pancreas_gallbladder vs. ovary,multiple_myeloma, non_cancer,anorectal,bladder_and_urothelial,cervical,melanoma, renal,lymphoid_neoplasm,head_and_neck,sarcoma,prostate, colorectal,uterine,myeloid_neoplasm,thyroid,upper_gi,breast

SEQ ID NO: 474332 - DNA, 3 bp, Homo sapiens
  chr7:27191273-27191276
  hyper
  pancreas_gallbladder vs. colorectal,upper_gi,sarcoma, non_cancer,myeloid_neoplasm,thyroid,anorectal,renal,prostate, multiple_myeloma,lymphoid_neoplasm
aac

SEQ ID NO: 474333 - DNA, 21 bp, Homo sapiens
  chr7:27196839-27196860
  hyper
  pancreas_gallbladder vs. colorectal,cervical,thyroid, myeloid_neoplasm,breast,renal,non_cancer,anorectal
tgtggttcgaataaagtcaac

SEQ ID NO: 474334 - DNA, 104 bp, Homo sapiens; identical to SEQ ID NO: 454482
  chr7:27204281-27204385
  hyper
  pancreas_gallbladder vs. cervical,anorectal

SEQ ID NO: 474335 - DNA, 22 bp, Homo sapiens
  chr7:27206083-27206105
  hyper
  pancreas_gallbladder vs. colorectal,prostate,anorectal, renal,myeloid_neoplasm
gtccccggccctcgaccccacg

SEQ ID NO: 474336 - DNA, 105 bp, Homo sapiens; identical to SEQ ID NO: 464762
  chr7:27223010-27223115
  hyper
  pancreas_gallbladder vs. upper_gi,colorectal

SEQ ID NO: 474337 - DNA, 269 bp, Homo sapiens; identical to SEQ ID NO: 464763
  chr7:27223306-27223575
  hyper
  pancreas_gallbladder vs. upper_gi,colorectal

SEQ ID NO: 474338 - DNA, 244 bp, Homo sapiens; identical to SEQ ID NO: 463016
  chr7:27223331-27223575
  hyper
  pancreas_gallbladder vs. colorectal,upper_gi

SEQ ID NO: 474339 - DNA, 47 bp, Homo sapiens; identical to SEQ ID NO: 358802
  chr7:27225249-27225296
  hyper
  pancreas_gallbladder vs. colorectal,upper_gi

SEQ ID NO: 474340 - DNA, 225 bp, Homo sapiens; identical to SEQ ID NO: 469408
  chr7:27238917-27239142
  hyper
  pancreas_gallbladder vs. upper_gi,colorectal

SEQ ID NO: 474341 - DNA, 158 bp, Homo sapiens; identical to SEQ ID NO: 463017
  chr7:27238984-27239142
  hyper
  pancreas_gallbladder vs. upper_gi,colorectal

SEQ ID NO: 474342 - DNA, 71 bp, Homo sapiens; identical to SEQ ID NO: 350551
  chr7:27245310-27245381
  hyper
  pancreas_gallbladder vs. colorectal

SEQ ID NO: 474343 - DNA, 78 bp, Homo sapiens; identical to SEQ ID NO: 456132
  chr7:27281871-27281949
  hyper
  pancreas_gallbladder vs. colorectal

SEQ ID NO: 474344 - DNA, 7 bp, Homo sapiens
  chr7:37487365-37487372
  hyper
  pancreas_gallbladder vs. uterine,ovary,lymphoid_neoplasm, breast,thyroid,myeloid_neoplasm,non_cancer,multiple_myeloma, prostate,sarcoma,renal,liver_bileduct,lung,melanoma, bladder_and_urothelial
cgctcgc

SEQ ID NO: 474345 - DNA, 1 bp, Homo sapiens
  chr7:45613422-45613423
  hyper
  pancreas_gallbladder vs. bladder_and_urothelial,lung, sarcoma,uterine,prostate,breast,thyroid,non_cancer,anorectal, head_and_neck,myeloid_neoplasm,renal
c

SEQ ID NO: 474346 - DNA, 95 bp, Homo sapiens; identical to SEQ ID NO: 358844
  chr7:45615102-45615197
  hyper
  pancreas_gallbladder vs. bladder_and_urothelial,lung

SEQ ID NO: 474347 - DNA, 102 bp, Homo sapiens; identical to SEQ ID NO: 345274
  chr7:50344738-50344840
  hyper
  pancreas_gallbladder vs. anorectal,lymphoid_neoplasm, multiple_myeloma,head_and_neck,non_cancer,uterine, myeloid_neoplasm,ovary

SEQ ID NO: 474348 - DNA, 5 bp, Homo sapiens
  chr7:64974264-64974269
  hyper
  pancreas_gallbladder vs. breast,sarcoma
cggcg

SEQ ID NO: 474349 - DNA, 61 bp, Homo sapiens; identical to SEQ ID NO: 458263
  chr7:64974448-64974509
  hyper
  pancreas_gallbladder vs. breast,sarcoma

SEQ ID NO: 474350 - DNA, 5 bp, Homo sapiens
  chr7:64974988-64974993
  hyper
  pancreas_gallbladder vs. breast,sarcoma
tcggc

SEQ ID NO: 474351 - DNA, 130 bp, Homo sapiens; identical to SEQ ID NO: 459841
  chr7:69064053-69064183
  hyper
  pancreas_gallbladder vs. lung,breast,ovary,renal

SEQ ID NO: 474352 - DNA, 200 bp, Homo sapiens; identical to SEQ ID NO: 350591
  chr7:69065161-69065361
  hyper
  pancreas_gallbladder vs. breast,anorectal,lung

SEQ ID NO: 474353 - DNA, 1 bp, Homo sapiens
  chr7:87257895-87257896
  hyper
  pancreas_gallbladder vs. liver_bileduct
c

SEQ ID NO: 474354 - DNA, 45 bp, Homo sapiens; identical to SEQ ID NO: 346914
  chr7:87258398-87258443
  hyper
  pancreas_gallbladder vs. liver_bileduct

SEQ ID NO: 474355 - DNA, 80 bp, Homo sapiens; identical to SEQ ID NO: 456135
  chr7:99155672-99155752
  hyper
  pancreas_gallbladder vs. liver_bileduct

SEQ ID NO: 474356 - DNA, 15 bp, Homo sapiens
  chr7:99156600-99156615
  hyper
  pancreas_gallbladder vs. liver_bileduct
ccgccgtcaggagcc

SEQ ID NO: 474357 - DNA, 58 bp, Homo sapiens; identical to SEQ ID NO: 358917
  chr7:100254132-100254190
  hyper
  pancreas_gallbladder vs. melanoma

SEQ ID NO: 474358 - DNA, 20 bp, Homo sapiens
  chr7:106684813-106684833
  hyper
  pancreas_gallbladder vs. lung,bladder_and_urothelial
cgggggttcaccatggcgaa

SEQ ID NO: 474359 - DNA, 252 bp, Homo sapiens; identical to SEQ ID NO: 463034
  chr7:106684920-106685172
  hyper
  pancreas_gallbladder vs. lung,bladder_and_urothelial

SEQ ID NO: 474360 - DNA, 221 bp, Homo sapiens; identical to SEQ ID NO: 346927
  chr7:106685920-106686141
  hyper
  pancreas_gallbladder vs. bladder_and_urothelial,lung

SEQ ID NO: 474361 - DNA, 24 bp, Homo sapiens
  chr7:108095249-108095273
  hyper
  pancreas_gallbladder vs. ovary
cgaggaagagcccagtctcttaga

SEQ ID NO: 474362 - DNA, 1 bp, Homo sapiens
  chr7:112429912-112429913
  hyper
  pancreas_gallbladder vs. upper_gi,colorectal, liver_bileduct,lung
c

SEQ ID NO: 474363 - DNA, 183 bp, Homo sapiens
  chr7:112430003-112430186
  hyper
  pancreas_gallbladder vs. upper_gi,colorectal, liver_bileduct,lung
cgcccagttgagggggaacccttgcgaaatacggagaggcgctcccacaccctccaatctccaaccaccactgtcaactcctccagaggcaggtatcctaccccggccctgggaggccgactgggcggagcttggggtccggaccacgcggagccctggcagtgtctatgcctagatctcgcc

SEQ ID NO: 474364 - DNA, 143 bp, Homo sapiens
  chr7:112430224-112430367
  hyper
  pancreas_gallbladder vs. upper_gi,colorectal, liver_bileduct,lung
cgtcgccaccaacgcgctctcccaaccctcggagtcagttccaaaaccaaaccaaaaaggaggagagcagacaaggcttcagcctgcgactgagaacagggaggcggcacgccttggggaacgagggcccgaggccatacgcg

SEQ ID NO: 474365 - DNA, 24 bp, Homo sapiens
  chr7:112430590-112430614
  hyper
  pancreas_gallbladder vs. upper_gi,colorectal, liver_bileduct,lung
gcctgccttcctcaagccaaagtc

SEQ ID NO: 474366 - DNA, 408 bp, Homo sapiens; identical to SEQ ID NO: 467694
  chr7:113726962-113727370
  hyper
  pancreas_gallbladder vs. lung,head_and_neck,anorectal

SEQ ID NO: 474367 - DNA, 119 bp, Homo sapiens; identical to SEQ ID NO: 350642
  chr7:121942391-121942510
  hyper
  pancreas_gallbladder vs. colorectal

SEQ ID NO: 474368 - DNA, 209 bp, Homo sapiens
  chr7:127671450-127671659
  hyper
  pancreas_gallbladder vs. cervical,lung
ggcgtcggccgctccgggccggcggcagctgattgcggtcgtgagctcgcggagcggcgagagttaagaggaggtgttcgcggcgccttcgccctccccagacacacaccccctttctcctcgcctcttctcggagggtggaagagacaaaaacggggggtcagttctccagtccgccggctgccggcacgcggggcggcgctccgtcc

SEQ ID NO: 474369 - DNA, 19 bp, Homo sapiens
  chr7:129423482-129423501
  hyper
  pancreas_gallbladder vs. thyroid,non_cancer,upper_gi, myeloid_neoplasm,renal
tgaaaaacgcaaaaggcac

SEQ ID NO: 474370 - DNA, 1 bp, Homo sapiens
  chr7:139167531-139167532
  hyper
  pancreas_gallbladder vs. anorectal
c

SEQ ID NO: 474371 - DNA, 269 bp, Homo sapiens; identical to SEQ ID NO: 350656
  chr7:139168725-139168994
  hyper
  pancreas_gallbladder vs. lung,head_and_neck,anorectal, upper_gi,breast,cervical

SEQ ID NO: 474372 - DNA, 40 bp, Homo sapiens
  chr7:155301671-155301711
  hyper
  pancreas_gallbladder vs. upper_gi,prostate
cgaatctcttgaaagttctctccttcgtcacagggtcttc

SEQ ID NO: 474373 - DNA, 15 bp, Homo sapiens
  chr7:156409835-156409850
  hyper
  pancreas_gallbladder vs. upper_gi,colorectal
catgccgggactgac

SEQ ID NO: 474374 - DNA, 23 bp, Homo sapiens
  chr7:156794976-156794999
  hyper
  pancreas_gallbladder vs. renal,non_cancer
cggatgagggaagggacaggtcc

SEQ ID NO: 474375 - DNA, 41 bp, Homo sapiens; identical to SEQ ID NO: 350684
  chr7:156796104-156796145
  hyper
  pancreas_gallbladder vs. non_cancer,myeloid_neoplasm, renal,anorectal

SEQ ID NO: 474376 - DNA, 64 bp, Homo sapiens; identical to SEQ ID NO: 464795
  chr7:156796431-156796495
  hyper
  pancreas_gallbladder vs. sarcoma,colorectal,cervical

SEQ ID NO: 474377 - DNA, 96 bp, Homo sapiens; identical to SEQ ID NO: 346951
  chr7:156799510-156799606
  hyper
  pancreas_gallbladder vs. cervical,thyroid,non_cancer

SEQ ID NO: 474378 - DNA, 1 bp, Homo sapiens
  chr7:156809654-156809655
  hyper
  pancreas_gallbladder vs. cervical
c

SEQ ID NO: 474379 - DNA, 34 bp, Homo sapiens
  chr7:156870979-156871013
  hyper
  pancreas_gallbladder vs. bladder_and_urothelial
cgggaagcgaacccacgaggtgcagagagcagag

SEQ ID NO: 474380 - DNA, 211 bp, Homo sapiens
  chr7:157361395-157361606
  hyper
  pancreas_gallbladder vs. liver_bileduct,upper_gi,lung, bladder_and_urothelial
cggcacgcagaggcaggtaacaaacgaccagcctcagaagcagatgtgcttgctgcaaaccaccttcctacggcccagcagaggcacaacaagcagcgaattttttccagggcctcccgtgaacacggcaccctacgttgccatagcgacgccatcccagctctgagccgcaacaaagcggcagtgtctgtgtctcacctttggccatctt

SEQ ID NO: 474381 - DNA, 53 bp, Homo sapiens; identical to SEQ ID NO: 350688
  chr7:157361751-157361804
  hyper
  pancreas_gallbladder vs. liver_bileduct,upper_gi,lung, bladder_and_urothelial

SEQ ID NO: 474382 - DNA, 217 bp, Homo sapiens; identical to SEQ ID NO: 458290
  chr7:157476655-157476872
  hyper
  pancreas_gallbladder vs. anorectal,multiple_myeloma, renal,bladder_and_urothelial

SEQ ID NO: 474383 - DNA, 43 bp, Homo sapiens; identical to SEQ ID NO: 467720
  chr8:495481-495524
  hyper
  pancreas_gallbladder vs. liver_bileduct,lung

SEQ ID NO: 474384 - DNA, 69 bp, Homo sapiens; identical to SEQ ID NO: 467721
  chr8:495635-495704
  hyper
  pancreas_gallbladder vs. liver_bileduct,lung

SEQ ID NO: 474385 - DNA, 18 bp, Homo sapiens
  chr8:496001-496019
  hyper
  pancreas_gallbladder vs. liver_bileduct,lung
ggacggagccgcgggaac

SEQ ID NO: 474386 - DNA, 151 bp, Homo sapiens
  chr8:11540276-11540427
  hyper
  pancreas_gallbladder vs. upper_gi,lung
cgtagtagtccccgtttgtgcaaaaacacctcttggccgtggcgatgtggggagggagtgtggtccaatagtccttctcacttctcagaggttgacacagaatctaacagttaccctcttagaactactccggagaattcggtaggtagta

SEQ ID NO: 474387 - DNA, 275 bp, Homo sapiens
  chr8:11540456-11540731
  hyper
  pancreas_gallbladder vs. upper_gi,lung
ttaaatgctatgggtgtggggacaagatactgggttcagagaaagttctgggaagagtcttgaggtggaaacagcctcggtgcgcgggggtttctcgacagctctctggtgtctcttaccccctaggttttcccagccttctcgccggattgccttggaaagctcttggtgtggtggccactggggtttgctccagcagagataatggaggggctcgctatctaatctggacagcagcaggaacaatccattagacctcagcatttatccggagc

SEQ ID NO: 474388 - DNA, 271 bp, Homo sapiens; identical to SEQ ID NO: 371799
  chr8:11540851-11541122
  hyper
  pancreas_gallbladder vs. upper_gi,lung

SEQ ID NO: 474389 - DNA, 155 bp, Homo sapiens; identical to SEQ ID NO: 463049
  chr8:11554731-11554886
  hyper
  pancreas_gallbladder vs. renal,multiple_myeloma, bladder_and_urothelial,myeloid_neoplasm,lung,prostate,breast, cervical

SEQ ID NO: 474390 - DNA, 55 bp, Homo sapiens; identical to SEQ ID NO: 463050
  chr8:11554915-11554970
  hyper
  pancreas_gallbladder vs. renal,multiple_myeloma, bladder_and_urothelial,myeloid_neoplasm,lung,prostate,breast, cervical

SEQ ID NO: 474391 - DNA, 141 bp, Homo sapiens; identical to SEQ ID NO: 350713
  chr8:11555521-11555662
  hyper
  pancreas_gallbladder vs. renal,multiple_myeloma, bladder_and_urothelial,myeloid_neoplasm,lung,prostate,breast, cervical

SEQ ID NO: 474392 - DNA, 172 bp, Homo sapiens
  chr8:24771632-24771804
  hyper
  pancreas_gallbladder vs. bladder_and_urothelial,sarcoma
cgaccgctttgccggctacatagagaaggtgcactacctggagcagcagaataaggagattgaggcggagatccaggcgctgcggcagaagcaggcctcgcacgcccagctgggcgacgcgtacgaccaggagatccgcgagctgcgcgccaccctggagatggtgaaccac

SEQ ID NO: 474393 - DNA, 88 bp, Homo sapiens; identical to SEQ ID NO: 350729
  chr8:25904367-25904455
  hyper
  pancreas_gallbladder vs. melanoma,lung,breast

SEQ ID NO: 474394 - DNA, 227 bp, Homo sapiens
  chr8:38326050-38326277
  hyper
cctccgcgcgctgcggctgcaccggcgtcccggctcccgctagctgccgcccgccgccgaggacgccgcgcctgtggccgcaagagcgctccgagcgctatgcgccggcggggcgcgagggctcgctctctcactcccacccgcgctggtccctcctccgcctccgccccctgcagctgcctgctgggccttgtagttccccagccgcggccccaaaggacggggag

SEQ ID NO: 474395 - DNA, 177 bp, Homo sapiens; identical to SEQ ID NO: 371869
  chr8:54795170-54795347
  hyper
  pancreas_gallbladder vs. uterine

SEQ ID NO: 474396 - DNA, 6 bp, Homo sapiens
  chr8:55372563-55372569
  hyper
  pancreas_gallbladder vs. ovary
tgatcc

SEQ ID NO: 474397 - DNA, 117 bp, Homo sapiens; identical to SEQ ID NO: 453446
  chr8:56014011-56014128
  hyper
  pancreas_gallbladder vs. lung,melanoma,head_and_neck

SEQ ID NO: 474398 - DNA, 117 bp, Homo sapiens; identical to SEQ ID NO: 453446
  chr8:56014011-56014128
  hyper
  pancreas_gallbladder vs. melanoma,lung,head_and_neck, sarcoma

SEQ ID NO: 474399 - DNA, 11 bp, Homo sapiens
  chr8:57069543-57069554
  hyper
  pancreas_gallbladder vs. myeloid_neoplasm,prostate, non_cancer
cgaaaagtaga

SEQ ID NO: 474400 - DNA, 7 bp, Homo sapiens
  chr8:65281846-65281853
  hyper
  pancreas_gallbladder vs. melanoma
cgggagc

SEQ ID NO: 474401 - DNA, 24 bp, Homo sapiens
  chr8:65492354-65492378
  hyper
cggaaagtcccatccccaaatcca

SEQ ID NO: 474402 - DNA, 261 bp, Homo sapiens; identical to SEQ ID NO: 467763
  chr8:65492407-65492668
  hyper

SEQ ID NO: 474403 - DNA, 267 bp, Homo sapiens; identical to SEQ ID NO: 350760
  chr8:65494311-65494578
  hyper
  pancreas_gallbladder vs. sarcoma,lung,anorectal

SEQ ID NO: 474404 - DNA, 38 bp, Homo sapiens
  chr8:69243994-69244032
  hyper
  pancreas_gallbladder vs. lung
tttttcttttcttttctttccttctttttttttttttt

SEQ ID NO: 474405 - DNA, 55 bp, Homo sapiens; identical to SEQ ID NO: 346990
  chr8:72756949-72757004
  hyper
  pancreas_gallbladder vs. sarcoma

SEQ ID NO: 474406 - DNA, 181 bp, Homo sapiens; identical to SEQ ID NO: 459870
  chr8:73449197-73449378
  hyper
  pancreas_gallbladder vs. head_and_neck

SEQ ID NO: 474407 - DNA, 208 bp, Homo sapiens; identical to SEQ ID NO: 459871
  chr8:73449432-73449640
  hyper
  pancreas_gallbladder vs. head_and_neck

SEQ ID NO: 474408 - DNA, 19 bp, Homo sapiens
  chr8:73450162-73450181
  hyper
  pancreas_gallbladder vs. head_and_neck
tttaagaatgaatcatcgc

SEQ ID NO: 474409 - DNA, 27 bp, Homo sapiens
  chr8:75896528-75896555
  hyper
  pancreas_gallbladder vs. lung,sarcoma
cgggcttgggtctcgggagcccaaagc

SEQ ID NO: 474410 - DNA, 77 bp, Homo sapiens; identical to SEQ ID NO: 346991
  chr8:75897394-75897471
  hyper
  pancreas_gallbladder vs. lung,sarcoma

SEQ ID NO: 474411 - DNA, 5 bp, Homo sapiens
  chr8:76316299-76316304
  hyper
  pancreas_gallbladder vs. upper_gi
cgggg

SEQ ID NO: 474412 - DNA, 172 bp, Homo sapiens; identical to SEQ ID NO: 359146
  chr8:76316995-76317167
  hyper
  pancreas_gallbladder vs. upper_gi

SEQ ID NO: 474413 - DNA, 99 bp, Homo sapiens; identical to SEQ ID NO: 345308
  chr8:82193698-82193797
  hyper
  pancreas_gallbladder vs. upper_gi

SEQ ID NO: 474414 - DNA, 18 bp, Homo sapiens
  chr8:97167794-97167812
  hyper
  pancreas_gallbladder vs. upper_gi
cgtgcccgcgctcatgca

SEQ ID NO: 474415 - DNA, 224 bp, Homo sapiens
  chr8:97167855-97168079
  hyper
  pancreas_gallbladder vs. upper_gi
ttccaaggctgttccctctttccggggaaataaagcctagattggaaccttctgcccagcttcctcatttggccgtctggtctgcattagtgtttttataagggactcaaacaaatcgaatacaaggtcaccaaataattaacagttgtgaattccctccgtccccattaaaatacttccctgcttatatttcattttcggtttgccaacgacaacagggtacc

SEQ ID NO: 474416 - DNA, 7 bp, Homo sapiens
  chr8:97168213-97168220
  hyper
  pancreas_gallbladder vs. upper_gi
cgcagcc

SEQ ID NO: 474417 - DNA, 430 bp, Homo sapiens; identical to SEQ ID NO: 463072
  chr8:104511554-104511984
  hyper
  pancreas_gallbladder vs. head_and_neck

SEQ ID NO: 474418 - DNA, 18 bp, Homo sapiens
  chr8:104511966-104511984
  hyper
  pancreas_gallbladder vs. head_and_neck,sarcoma
cgctcagtctctcctccc

SEQ ID NO: 474419 - DNA, 48 bp, Homo sapiens; identical to SEQ ID NO: 347002
  chr8:105236123-105236171
  hyper
  pancreas_gallbladder vs. cervical

SEQ ID NO: 474420 - DNA, 226 bp, Homo sapiens
  chr8:109799189-109799415
  hyper
  pancreas_gallbladder vs. anorectal,ovary,uterine,lung, liver_bileduct,head_and_neck
cgatttcctttgcagctccctaatccggggtttccattctcagtggagaatggataatcccaggggaccagctaaagactcttttcttccgtcctctccctctttttcctctgatctgcttaaaagcccagttaacgacattgcaccttaaagcgaggggacacgcactttccctcgtccatctgtcatcaattaaaagcattaatatttgctttaaactgacaca

SEQ ID NO: 474421 - DNA, 42 bp, Homo sapiens; identical to SEQ ID NO: 350816
  chr8:109799903-109799945
  hyper
  pancreas_gallbladder vs. anorectal,ovary,uterine,lung, liver_bileduct,head_and_neck

SEQ ID NO: 474422 - DNA, 100 bp, Homo sapiens; identical to SEQ ID NO: 453479
  chr8:110986113-110986213
  hyper
  pancreas_gallbladder vs. colorectal

SEQ ID NO: 474423 - DNA, 174 bp, Homo sapiens; identical to SEQ ID NO: 350818
  chr8:110987222-110987396
  hyper
  pancreas_gallbladder vs. colorectal

SEQ ID NO: 474424 - DNA, 541 bp, Homo sapiens; identical to SEQ ID NO: 454513
  chr8:121823361-121823902
  hyper
  pancreas_gallbladder vs. liver_bileduct

SEQ ID NO: 474425 - DNA, 27 bp, Homo sapiens
  chr8:121823930-121823957
  hyper
  pancreas_gallbladder vs. liver_bileduct
ctcgctgctcagaaccagggcgtcctc

SEQ ID NO: 474426 - DNA, 12 bp, Homo sapiens
  chr8:133492249-133492261
  hyper
  pancreas_gallbladder vs. anorectal,renal
cgcgtgctgagg

SEQ ID NO: 474427 - DNA, 311 bp, Homo sapiens
  chr8:133493185-133493496
  hyper
  pancreas_gallbladder vs. lung,renal
agcccggtgccagccgccctcccgcccgccagccacacgcgccgccgccgccgcctcctccctcctccgcgctcccacccgcgcccctccccgcccgttccagcctcagcctgtcagcagcagcagcagcgagcgcgccgcgggccgagagcacgccgcgtccctccctccctccttccccggggtggggccccattgtcccgccccgtcgcggcgggaggcccgggcggcggcgccccgcctcttcccgccgacccccaccgctgattgtctggggacccaggatcgcctgggctaccgccgcccccgtt

SEQ ID NO: 474428 - DNA, 121 bp, Homo sapiens; identical to SEQ ID NO: 458331
  chr8:143531858-143531979
  hyper
  pancreas_gallbladder vs. anorectal,lung

SEQ ID NO: 474429 - DNA, 102 bp, Homo sapiens
  chr8:144512372-144512474
  hyper
  pancreas_gallbladder vs. anorectal
gaagctgggcgaggagggcacggaggagcagggcgtgctgagcggcgtcgaggacagcgagcctggcggcaggcggtggcagaagcgctcggcctcgggagg

SEQ ID NO: 474430 - DNA, 7 bp, Homo sapiens
  chr8:144512503-144512510
  hyper
  pancreas_gallbladder vs. anorectal
cgaagtc

SEQ ID NO: 474431 - DNA, 29 bp, Homo sapiens
  chr9:841339-841368
  hyper
  pancreas_gallbladder vs. melanoma
cggctctggtcttgacctggggagcccag

SEQ ID NO: 474432 - DNA, 316 bp, Homo sapiens; identical to SEQ ID NO: 453489
  chr9:6644554-6644870
  hyper
  pancreas_gallbladder vs. renal

SEQ ID NO: 474433 - DNA, 114 bp, Homo sapiens; identical to SEQ ID NO: 453490
  chr9:6644756-6644870
  hyper
  pancreas_gallbladder vs. renal

SEQ ID NO: 474434 - DNA, 22 bp, Homo sapiens
  chr9:36036762-36036784
  hyper
  pancreas_gallbladder vs. lung,melanoma
cgacacacagttgggccataac

SEQ ID NO: 474435 - DNA, 9 bp, Homo sapiens
  chr9:37028066-37028075
  hyper
  pancreas_gallbladder vs. lymphoid_neoplasm,melanoma, prostate,non_cancer,myeloid_neoplasm
agagcagtc

SEQ ID NO: 474436 - DNA, 63 bp, Homo sapiens; identical to SEQ ID NO: 456188
  chr9:37034135-37034198
  hyper
  pancreas_gallbladder vs. lymphoid_neoplasm,uterine, colorectal,prostate,non_cancer,ovary

SEQ ID NO: 474437 - DNA, 242 bp, Homo sapiens; identical to SEQ ID NO: 464831
  chr9:37035886-37036128
  hyper
  pancreas_gallbladder vs. upper_gi

SEQ ID NO: 474438 - DNA, 3 bp, Homo sapiens
  chr9:66494093-66494096
  hyper
  pancreas_gallbladder vs. bladder_and_urothelial,breast, lymphoid_neoplasm,ovary,lung,multiple_myeloma
cgc

SEQ ID NO: 474439 - DNA, 102 bp, Homo sapiens; identical to SEQ ID NO: 458342
  chr9:77111662-77111764
  hyper
  pancreas_gallbladder vs. anorectal

SEQ ID NO: 474440 - DNA, 9 bp, Homo sapiens
  chr9:77112369-77112378
  hyper
  pancreas_gallbladder vs. anorectal
atccacacc

SEQ ID NO: 474441 - DNA, 168 bp, Homo sapiens
  chr9:80911724-80911892
  hyper
  pancreas_gallbladder vs. upper_gi
cggccagattgcgggctcaaggggcgaaggcaggttggcaggggcagcctcttcccgccgcccacaatcctcgggcgggcgcgcagccgagccggctcggctggctggcgcaatctcgcgcgctccttgcattgatcaaaaatgggggttgaaacagtaaacgcgagg

SEQ ID NO: 474442 - DNA, 444 bp, Homo sapiens; identical to SEQ ID NO: 372130
  chr9:80912036-80912480
  hyper
  pancreas_gallbladder vs. upper_gi

SEQ ID NO: 474443 - DNA, 244 bp, Homo sapiens; identical to SEQ ID NO: 458344
  chr9:87283766-87284010
  hyper
  pancreas_gallbladder vs. head_and_neck

SEQ ID NO: 474444 - DNA, 1 bp, Homo sapiens
  chr9:100613687-100613688
  hyper
  pancreas_gallbladder vs. cervical
c

SEQ ID NO: 474445 - DNA, 360 bp, Homo sapiens; identical to SEQ ID NO: 372222
  chr9:126771808-126772168
  hyper
  pancreas_gallbladder vs. prostate,breast

SEQ ID NO: 474446 - DNA, 168 bp, Homo sapiens; identical to SEQ ID NO: 459902
  chr9:129485513-129485681
  hyper
  pancreas_gallbladder vs. bladder_and_urothelial,breast, renal,prostate,anorectal,lymphoid_neoplasm

SEQ ID NO: 474447 - DNA, 11 bp, Homo sapiens
  chr9:136474214-136474225
  hyper
  pancreas_gallbladder vs. melanoma
cgcgctgcccc

SEQ ID NO: 474448 - DNA, 3 bp, Homo sapiens
  chr9:136474782-136474785
  hyper
  pancreas_gallbladder vs. melanoma
tcc

SEQ ID NO: 474449 - DNA, 4 bp, Homo sapiens
  chr9:139739050-139739054
  hyper
  pancreas_gallbladder vs. upper_gi
cggc

SEQ ID NO: 474450 - DNA, 140 bp, Homo sapiens
  chr9:139740877-139741017
  hyper
  pancreas_gallbladder vs. cervical,head_and_neck
ggcgcaccgagaccatgttcaacgcctgcctctacttcaagtcctgccacagctgctacacctactactgctcgcgcctgtgccgccgcgaggactgggacgcccacaaggcgcgctgcgtgtacggccgcgtgggcagc

SEQ ID NO: 474451 - DNA, 31 bp, Homo sapiens
  chr9:139741046-139741077
  hyper
  pancreas_gallbladder vs. cervical,head_and_neck
cgacagcggcccggtgcaccgcgctttctcg

SEQ ID NO: 474452 - DNA, 68 bp, Homo sapiens
  chr9:139740949-139741017
  hyper
  pancreas_gallbladder vs. head_and_neck,cervical
cgcgcctgtgccgccgcgaggactgggacgcccacaaggcgcgctgcgtgtacggccgcgtgggcagc

SEQ ID NO: 474453 - DNA, 31 bp, Homo sapiens; identical to SEQ ID NO: 474451
  chr9:139741046-139741077
  hyper
  pancreas_gallbladder vs. head_and_neck,cervical

SEQ ID NO: 474454 - DNA, 29 bp, Homo sapiens
  chr9:139741690-139741719
  hyper
  pancreas_gallbladder vs. head_and_neck,cervical
cggaccggcgcaccggccgccccttcatg

SEQ ID NO: 474455 - DNA, 949 bp, Homo sapiens; identical to SEQ ID NO: 454530
  chrY:16636193-16637142
  hyper
  pancreas_gallbladder vs. liver_bileduct

SEQ ID NO: 474456 - DNA, 72 bp, Homo sapiens; identical to SEQ ID NO: 464858
  chr1:1974777-1974849
  hypo
  pancreas_gallbladder vs. liver_bileduct, lymphoid_neoplasm

SEQ ID NO: 474457 - DNA, 162 bp, Homo sapiens; identical to SEQ ID NO: 362225
  chr1:1974925-1975087
  hypo
  pancreas_gallbladder vs. liver_bileduct, lymphoid_neoplasm

SEQ ID NO: 474458 - DNA, 87 bp, Homo sapiens; identical to SEQ ID NO: 336846
  chr1:3377848-3377935
  hypo
  pancreas_gallbladder vs. liver_bileduct

SEQ ID NO: 474459 - DNA, 362 bp, Homo sapiens; identical to SEQ ID NO: 336882
  chr1:6333795-6334157
  hypo
  pancreas_gallbladder vs. anorectal

SEQ ID NO: 474460 - DNA, 426 bp, Homo sapiens; identical to SEQ ID NO: 457245
  chr1:9711649-9712075
  hypo
  pancreas_gallbladder vs. lymphoid_neoplasm,prostate, head_and_neck,sarcoma,lung,multiple_myeloma, bladder_and_urothelial,non_cancer,uterine,myeloid_neoplasm, breast,ovary,thyroid

SEQ ID NO: 474461 - DNA, 53 bp, Homo sapiens; identical to SEQ ID NO: 462206
  chr1:11538821-11538874
  hypo
  pancreas_gallbladder vs. cervical,melanoma,ovary,breast, anorectal,prostate,head_and_neck,colorectal,uterine

SEQ ID NO: 474462 - DNA, 64 bp, Homo sapiens; identical to SEQ ID NO: 346318
  chr1:12123950-12124014
  hypo
  pancreas_gallbladder vs. lymphoid_neoplasm

SEQ ID NO: 474463 - DNA, 57 bp, Homo sapiens; identical to SEQ ID NO: 473537
  chr1:13840257-13840314
  hypo
  pancreas_gallbladder vs. head_and_neck

SEQ ID NO: 474464 - DNA, 265 bp, Homo sapiens; identical to SEQ ID NO: 473538
  chr1:13840257-13840522
  hypo
  pancreas_gallbladder vs. head_and_neck

SEQ ID NO: 474465 - DNA, 77 bp, Homo sapiens; identical to SEQ ID NO: 454554
  chr1:14125492-14125569
  hypo
  pancreas_gallbladder vs. lymphoid_neoplasm

SEQ ID NO: 474466 - DNA, 54 bp, Homo sapiens; identical to SEQ ID NO: 352807
  chr1:14125622-14125676
  hypo
  pancreas_gallbladder vs. lymphoid_neoplasm

SEQ ID NO: 474467 - DNA, 170 bp, Homo sapiens; identical to SEQ ID NO: 469989
  chr1:16474862-16475032
  hypo
  pancreas_gallbladder vs. liver_bileduct,cervical,breast, colorectal,melanoma,upper_gi,uterine,head_and_neck,anorectal, lung,lymphoid_neoplasm

SEQ ID NO: 474468 - DNA, 75 bp, Homo sapiens; identical to SEQ ID NO: 347796
  chr1:16475432-16475507
  hypo
  pancreas_gallbladder vs. liver_bileduct,cervical,breast, colorectal,melanoma,upper_gi,uterine,head_and_neck,anorectal, lung,lymphoid_neoplasm

SEQ ID NO: 474469 - DNA, 176 bp, Homo sapiens
  chr1:16534331-16534507
  hypo
  pancreas_gallbladder vs. colorectal
cggcccaggcaccctgacggcctcaggcggccggtgagtgggcatcgcccacccccacccccacccggcatctggctgccctcagggcccatgggaggagctggtaccttcccgggctgctccggtgcctgacccagagatgagtgcccgggctgctgaattccgccccaggcgca

SEQ ID NO: 474470 - DNA, 263 bp, Homo sapiens; identical to SEQ ID NO: 336961
  chr1:19711526-19711789
  hypo
  pancreas_gallbladder vs. head_and_neck,lung

SEQ ID NO: 474471 - DNA, 33 bp, Homo sapiens; identical to SEQ ID NO: 454089
  chr1:25255579-25255612
  hypo
  pancreas_gallbladder vs. lymphoid_neoplasm,cervical, head_and_neck

SEQ ID NO: 474472 - DNA, 7 bp, Homo sapiens
  chr1:25255934-25255941
  hypo
  pancreas_gallbladder vs. lymphoid_neoplasm,cervical, head_and_neck
agccaga

SEQ ID NO: 474473 - DNA, 238 bp, Homo sapiens
  chr1:27875852-27876090
  hypo
  pancreas_gallbladder vs. head_and_neck
cgtcctggtgggaaggtctggcgcgcggacaggacaggctgaaaggaggggtccgccccagccccgctgctacccactgccactgggctggccttggctccccggctagggaaggtggccaggccccgctgggcaggcagggcactggtgggtggccctgcataggtgcccgatgccttccgggactctgggcgagaggctgagagggcaaagtccaagagatcggaggagtcatccg

SEQ ID NO: 474474 - DNA, 111 bp, Homo sapiens; identical to SEQ ID NO: 296950
  chr1:27876333-27876444
  hypo
  pancreas_gallbladder vs. head_and_neck

SEQ ID NO: 474475 - DNA, 12 bp, Homo sapiens
  chr1:28293280-28293292
  hypo
  pancreas_gallbladder vs. upper_gi,colorectal, lymphoid_neoplasm
cggaccccagct

SEQ ID NO: 474476 - DNA, 191 bp, Homo sapiens; identical to SEQ ID NO: 362418
  chr1:28293404-28293595
  hypo
  pancreas_gallbladder vs. upper_gi,colorectal, lymphoid_neoplasm

SEQ ID NO: 474477 - DNA, 158 bp, Homo sapiens; identical to SEQ ID NO: 459263
  chr1:34629913-34630071
  hypo

SEQ ID NO: 474478 - DNA, 225 bp, Homo sapiens; identical to SEQ ID NO: 457259
  chr1:34629913-34630138
  hypo

SEQ ID NO: 474479 - DNA, 121 bp, Homo sapiens; identical to SEQ ID NO: 459266
  chr1:35394922-35395043
  hypo
  pancreas_gallbladder vs. ovary,breast,uterine,lung, prostate

SEQ ID NO: 474480 - DNA, 856 bp, Homo sapiens; identical to SEQ ID NO: 337041
  chr1:43888937-43889793
  hypo
  pancreas_gallbladder vs. liver_bileduct

SEQ ID NO: 474481 - DNA, 106 bp, Homo sapiens; identical to SEQ ID NO: 458476
  chr1:44726788-44726894
  hypo
  pancreas_gallbladder vs. liver_bileduct

SEQ ID NO: 474482 - DNA, 14 bp, Homo sapiens
  chr1:44727316-44727330
  hypo
  pancreas_gallbladder vs. liver_bileduct
atgcgctccgctcc

SEQ ID NO: 474483 - DNA, 289 bp, Homo sapiens; identical to SEQ ID NO: 452731
  chr1:101702081-101702370
  hypo
  pancreas_gallbladder vs. sarcoma,uterine, myeloid_neoplasm,non_cancer,ovary,thyroid,prostate, bladder_and_urothelial

SEQ ID NO: 474484 - DNA, 152 bp, Homo sapiens; identical to SEQ ID NO: 452732
  chr1:101702796-101702948
  hypo
  pancreas_gallbladder vs. sarcoma,uterine, myeloid_neoplasm,non_cancer,ovary,thyroid,prostate, bladder_and_urothelial

SEQ ID NO: 474485 - DNA, 393 bp, Homo sapiens; identical to SEQ ID NO: 452733
  chr1:101702796-101703189
  hypo
  pancreas_gallbladder vs. sarcoma,uterine,prostate, non_cancer,myeloid_neoplasm

SEQ ID NO: 474486 - DNA, 52 bp, Homo sapiens
  chr1:116214053-116214105
  hypo
  pancreas_gallbladder vs. liver_bileduct, lymphoid_neoplasm
caggccgggagcctcagactccagacttttcatggtgcgctccttcctgctt

SEQ ID NO: 474487 - DNA, 253 bp, Homo sapiens; identical to SEQ ID NO: 347831
  chr1:153540242-153540495
  hypo
  pancreas_gallbladder vs. breast,uterine, lymphoid_neoplasm

SEQ ID NO: 474488 - DNA, 24 bp, Homo sapiens
  chr1:155161023-155161047
  hypo
  pancreas_gallbladder vs. head_and_neck,liver_bileduct
aaggcgggcctgttgtccggggcc

SEQ ID NO: 474489 - DNA, 282 bp, Homo sapiens; identical to SEQ ID NO: 337187
  chr1:156047227-156047509
  hypo
  pancreas_gallbladder vs. liver_bileduct

SEQ ID NO: 474490 - DNA, 92 bp, Homo sapiens; identical to SEQ ID NO: 456298
  chr1:156432033-156432125
  hypo
  pancreas_gallbladder vs. liver_bileduct

SEQ ID NO: 474491 - DNA, 712 bp, Homo sapiens; identical to SEQ ID NO: 349339
  chr1:161409991-161410703
  hypo
  pancreas_gallbladder vs. upper_gi

SEQ ID NO: 474492 - DNA, 250 bp, Homo sapiens; identical to SEQ ID NO: 454103
  chr1:182583799-182584049
  hypo
  pancreas_gallbladder vs. cervical,ovary,lung,breast, uterine,head_and_neck,renal,upper_gi,prostate,multiple_myeloma, non_cancer,myeloid_neoplasm,thyroid,lymphoid_neoplasm,melanoma, sarcoma,colorectal,anorectal

SEQ ID NO: 474493 - DNA, 40 bp, Homo sapiens; identical to SEQ ID NO: 344983
  chr1:182584613-182584653
  hypo
  pancreas_gallbladder vs. cervical,ovary,lung,breast, uterine,head_and_neck,renal,upper_gi,prostate,multiple_myeloma, non_cancer,myeloid_neoplasm,thyroid,lymphoid_neoplasm,melanoma, sarcoma,colorectal,anorectal

SEQ ID NO: 474494 - DNA, 817 bp, Homo sapiens; identical to SEQ ID NO: 337301
  chr1:205631783-205632600
  hypo
  pancreas_gallbladder vs. liver_bileduct

SEQ ID NO: 474495 - DNA, 593 bp, Homo sapiens; identical to SEQ ID NO: 473578
  chr1:220701523-220702116
  hypo
  pancreas_gallbladder vs. head_and_neck,cervical

SEQ ID NO: 474496 - DNA, 54 bp, Homo sapiens; identical to SEQ ID NO: 337335
  chr1:226311830-226311884
  hypo
  pancreas_gallbladder vs. upper_gi

SEQ ID NO: 474497 - DNA, 359 bp, Homo sapiens; identical to SEQ ID NO: 454601
  chr1:228528433-228528792
  hypo
  pancreas_gallbladder vs. renal,breast,anorectal,prostate, thyroid

SEQ ID NO: 474498 - DNA, 50 bp, Homo sapiens; identical to SEQ ID NO: 347858
  chr1:228529382-228529432
  hypo
  pancreas_gallbladder vs. renal,breast,anorectal,prostate, thyroid

SEQ ID NO: 474499 - DNA, 248 bp, Homo sapiens; identical to SEQ ID NO: 337370
  chr1:230346868-230347116
  hypo
  pancreas_gallbladder vs. liver_bileduct

SEQ ID NO: 474500 - DNA, 223 bp, Homo sapiens; identical to SEQ ID NO: 337371
  chr1:230379488-230379711
  hypo
  pancreas_gallbladder vs. liver_bileduct

SEQ ID NO: 474501 - DNA, 194 bp, Homo sapiens; identical to SEQ ID NO: 459968
  chr1:230404024-230404218
  hypo
  pancreas_gallbladder vs. lymphoid_neoplasm,melanoma, head_and_neck

SEQ ID NO: 474502 - DNA, 196 bp, Homo sapiens; identical to SEQ ID NO: 352995
  chr1:230404365-230404561
  hypo
  pancreas_gallbladder vs. lymphoid_neoplasm,melanoma, head_and_neck

SEQ ID NO: 474503 - DNA, 4 bp, Homo sapiens
  chr1:237205156-237205160
  hypo
  pancreas_gallbladder vs. sarcoma
cgtg

SEQ ID NO: 474504 - DNA, 37 bp, Homo sapiens; identical to SEQ ID NO: 466027
  chr1:237205188-237205225
  hypo
  pancreas_gallbladder vs. sarcoma

SEQ ID NO: 474505 - DNA, 162 bp, Homo sapiens; identical to SEQ ID NO: 459976
  chr10:3160827-3160989
  hypo
  pancreas_gallbladder vs. bladder_and_urothelial, lymphoid_neoplasm,anorectal,breast,cervical

SEQ ID NO: 474506 - DNA, 125 bp, Homo sapiens; identical to SEQ ID NO: 354487
  chr10:3161171-3161296
  hypo
  pancreas_gallbladder vs. bladder_and_urothelial, lymphoid_neoplasm,anorectal,breast,cervical

SEQ ID NO: 474507 - DNA, 277 bp, Homo sapiens; identical to SEQ ID NO: 365264
  chr10:5638918-5639195
  hypo
  pancreas_gallbladder vs. upper_gi

SEQ ID NO: 474508 - DNA, 61 bp, Homo sapiens; identical to SEQ ID NO: 459300
  chr10:7453036-7453097
  hypo
  pancreas_gallbladder vs. renal,breast,melanoma, multiple_myeloma

SEQ ID NO: 474509 - DNA, 61 bp, Homo sapiens; identical to SEQ ID NO: 459300
  chr10:7453036-7453097
  hypo
  pancreas_gallbladder vs. melanoma,breast,renal

SEQ ID NO: 474510 - DNA, 42 bp, Homo sapiens; identical to SEQ ID NO: 350990
  chr10:11060746-11060788
  hypo
  pancreas_gallbladder vs. colorectal,lung

SEQ ID NO: 474511 - DNA, 191 bp, Homo sapiens; identical to SEQ ID NO: 468631
  chr10:13933246-13933437
  hypo
  pancreas_gallbladder vs. ovary,bladder_and_urothelial, uterine,multiple_myeloma,lung,myeloid_neoplasm

SEQ ID NO: 474512 - DNA, 209 bp, Homo sapiens; identical to SEQ ID NO: 452758
  chr10:17270445-17270654
  hypo
  pancreas_gallbladder vs. melanoma

SEQ ID NO: 474513 - DNA, 15 bp, Homo sapiens
  chr10:17495988-17496003
  hypo
  pancreas_gallbladder vs. breast,ovary
cgaccccctccccca

SEQ ID NO: 474514 - DNA, 791 bp, Homo sapiens; identical to SEQ ID NO: 457329
  chr10:31607954-31608745
  hypo
  pancreas_gallbladder vs. liver_bileduct

SEQ ID NO: 474515 - DNA, 467 bp, Homo sapiens; identical to SEQ ID NO: 457330
  chr10:31608278-31608745
  hypo
  pancreas_gallbladder vs. liver_bileduct

SEQ ID NO: 474516 - DNA, 94 bp, Homo sapiens; identical to SEQ ID NO: 351040
  chr10:50606762-50606856
  hypo
  pancreas_gallbladder vs. melanoma,prostate, bladder_and_urothelial,sarcoma,head_and_neck

SEQ ID NO: 474517 - DNA, 12 bp, Homo sapiens
  chr10:52177724-52177736
  hypo
  pancreas_gallbladder vs. upper_gi,liver_bileduct, bladder_and_urothelial,head_and_neck,uterine,cervical,breast, colorectal,renal,ovary,lymphoid_neoplasm,lung,non_cancer, anorectal,sarcoma
cgccgtagtaga

SEQ ID NO: 474518 - DNA, 134 bp, Homo sapiens; identical to SEQ ID NO: 340660
  chr10:73591528-73591662
  hypo
  pancreas_gallbladder vs. upper_gi,colorectal

SEQ ID NO: 474519 - DNA, 82 bp, Homo sapiens; identical to SEQ ID NO: 459323
  chr10:92617016-92617098
  hypo
  pancreas_gallbladder vs. bladder_and_urothelial

SEQ ID NO: 474520 - DNA, 278 bp, Homo sapiens; identical to SEQ ID NO: 459324
  chr10:92617539-92617817
  hypo
  pancreas_gallbladder vs. bladder_and_urothelial

SEQ ID NO: 474521 - DNA, 93 bp, Homo sapiens; identical to SEQ ID NO: 354593
  chr10:119807131-119807224
  hypo

SEQ ID NO: 474522 - DNA, 229 bp, Homo sapiens; identical to SEQ ID NO: 340772
  chr10:126696804-126697033
  hypo
  pancreas_gallbladder vs. upper_gi

SEQ ID NO: 474523 - DNA, 106 bp, Homo sapiens
  chr10:131348408-131348514
  hypo
  pancreas_gallbladder vs. colorectal,upper_gi, liver_bileduct
cgtacagttgagcgacattagttggtgccatctgtgagtgcacagtgcagcaactttagggggttcacaatgttccgcagccatcaccgccgcccagcactggcat

SEQ ID NO: 474524 - DNA, 381 bp, Homo sapiens; identical to SEQ ID NO: 365480
  chr10:134212590-134212971
  hypo

SEQ ID NO: 474525 - DNA, 344 bp, Homo sapiens; identical to SEQ ID NO: 472749
  chr11:561903-562247
  hypo
  pancreas_gallbladder vs. lymphoid_neoplasm,cervical, colorectal

SEQ ID NO: 474526 - DNA, 38 bp, Homo sapiens; identical to SEQ ID NO: 472750
  chr11:562209-562247
  hypo
  pancreas_gallbladder vs. cervical,lymphoid_neoplasm, melanoma,colorectal,anorectal

SEQ ID NO: 474527 - DNA, 244 bp, Homo sapiens; identical to SEQ ID NO: 348463
  chr11:562884-563128
  hypo
  pancreas_gallbladder vs. cervical,lymphoid_neoplasm, melanoma,colorectal,anorectal

SEQ ID NO: 474528 - DNA, 111 bp, Homo sapiens; identical to SEQ ID NO: 464968
  chr11:763192-763303
  hypo
  pancreas_gallbladder vs. sarcoma,lymphoid_neoplasm

SEQ ID NO: 474529 - DNA, 62 bp, Homo sapiens; identical to SEQ ID NO: 354654
  chr11:764018-764080
  hypo
  pancreas_gallbladder vs. sarcoma,lymphoid_neoplasm

SEQ ID NO: 474530 - DNA, 706 bp, Homo sapiens
  chr11:1535842-1536548
  hypo
  pancreas_gallbladder vs. upper_gi
cgggagcacccagggaacacaagtgcaccatgacgcggagcccttcatcaccgcaggccacggcgcttgtccttcccagaggcccccaaccacagctgctgagcgacacccacaccgcttctctcttcacacagcggactgatgaggagtcccgccaagcaggagctctgagccacagcacagagtgtgctggcccaagtccacgcctgcatgcaagctcagccatgcgtctaatggcaataaccgtggaatgagctcgtgaggttcggagagtcccaccccgacggggagagccacagggagccccaatctcggcagtgaccggctccaggtccccacgtaccgtgagagtggggacagcggtggacagcagcccttgagcagggcacaaccttcagagagacctcgacaagtgaacacttaaaccaaggtcgaccctgggggaaacgcagacctcctcccagtgcccccttcagaaaaggtactcaaacactggctcccatcatgagctgggcacggaaccaggcatgggtactacctgcctccagggcttggagctcgggaggggaaccaatcccgggccctcgacctgggaggtgccagaaggccctcacacaagactccagcactagggtggggaggttaaagtaaacaggacagaggggttcaactaagacaatacctttgctcacggtcagaggcgaag

SEQ ID NO: 474531 - DNA, 95 bp, Homo sapiens; identical to SEQ ID NO: 365576
  chr11:1536583-1536678
  hypo
  pancreas_gallbladder vs. upper_gi

SEQ ID NO: 474532 - DNA, 565 bp, Homo sapiens; identical to SEQ ID NO: 457353
  chr11:2398759-2399324
  hypo
  pancreas_gallbladder vs. lung,colorectal,head_and_neck

SEQ ID NO: 474533 - DNA, 112 bp, Homo sapiens; identical to SEQ ID NO: 457354
  chr11:2399399-2399511
  hypo
  pancreas_gallbladder vs. lung,colorectal,head_and_neck

SEQ ID NO: 474534 - DNA, 286 bp, Homo sapiens; identical to SEQ ID NO: 457355
  chr11:2399038-2399324
  hypo
  pancreas_gallbladder vs. head_and_neck,lung

SEQ ID NO: 474535 - DNA, 401 bp, Homo sapiens; identical to SEQ ID NO: 351145
  chr11:2399399-2399800
  hypo
  pancreas_gallbladder vs. head_and_neck,lung

SEQ ID NO: 474536 - DNA, 312 bp, Homo sapiens; identical to SEQ ID NO: 340952
  chr11:2569208-2569520
  hypo
  pancreas_gallbladder vs. colorectal

SEQ ID NO: 474537 - DNA, 5 bp, Homo sapiens
  chr11:18512388-18512393
  hypo
  pancreas_gallbladder vs. head_and_neck
cgttg

SEQ ID NO: 474538 - DNA, 70 bp, Homo sapiens; identical to SEQ ID NO: 365638
  chr11:18512439-18512509
  hypo
  pancreas_gallbladder vs. head_and_neck

SEQ ID NO: 474539 - DNA, 77 bp, Homo sapiens; identical to SEQ ID NO: 372675
  chr11:20179003-20179080
  hypo
  pancreas_gallbladder vs. thyroid,head_and_neck

SEQ ID NO: 474540 - DNA, 7 bp, Homo sapiens
  chr11:46777035-46777042
  hypo
  pancreas_gallbladder vs. lymphoid_neoplasm
cgtgagc

SEQ ID NO: 474541 - DNA, 39 bp, Homo sapiens; identical to SEQ ID NO: 379697
  chr11:46777060-46777099
  hypo
  pancreas_gallbladder vs. lymphoid_neoplasm

SEQ ID NO: 474542 - DNA, 17 bp, Homo sapiens
  chr11:47358910-47358927
  hypo
  pancreas_gallbladder vs. prostate,lymphoid_neoplasm, breast
cggggggcaggaccagg

SEQ ID NO: 474543 - DNA, 106 bp, Homo sapiens; identical to SEQ ID NO: 348490
  chr11:47359237-47359343
  hypo
  pancreas_gallbladder vs. prostate,lymphoid_neoplasm, breast

SEQ ID NO: 474544 - DNA, 117 bp, Homo sapiens
  chr11:57071417-57071534
  hypo
  pancreas_gallbladder vs. lymphoid_neoplasm,colorectal, upper_gi
cgccctgtccagcggccactccccaaaatgacacattcacattcatcaccatcacacacactcaggcagagagcttgtgcgctgtttgtcactcccccagatggacctcgcacccac

SEQ ID NO: 474545 - DNA, 316 bp, Homo sapiens; identical to SEQ ID NO: 462351
  chr11:61276101-61276417
  hypo
  pancreas_gallbladder vs. colorectal,anorectal, head_and_neck

SEQ ID NO: 474546 - DNA, 316 bp, Homo sapiens; identical to SEQ ID NO: 462351
  chr11:61276101-61276417
  hypo
  pancreas_gallbladder vs. breast,colorectal,head_and_neck, cervical,uterine,lung,prostate,thyroid,ovary,sarcoma, bladder_and_urothelial,myeloid_neoplasm,non_cancer,anorectal

SEQ ID NO: 474547 - DNA, 8 bp, Homo sapiens
  chr11:63779104-63779112
  hypo
  pancreas_gallbladder vs. head_and_neck
cgcaagca

SEQ ID NO: 474548 - DNA, 88 bp, Homo sapiens; identical to SEQ ID NO: 365693
  chr11:63779256-63779344
  hypo
  pancreas_gallbladder vs. head_and_neck

SEQ ID NO: 474549 - DNA, 343 bp, Homo sapiens
  chr11:64124362-64124705
  hypo
  pancreas_gallbladder vs. liver_bileduct
cgctgagggaacagcaggcgtggtgcagctggaagcggggggtattggcaggtcgggggtgggcagaaggtgctcgagcctgtgggcctcctgggactctgggagtcctcctgagggaagcagatctcagctgagcctttccctctaggccctgaggtacaggaaccggagaaacgtcccctcaccccatccctcagccagtgacaccgtgggaacagcaggcttgggagtgcagccttctcggcactggagtgtcagcggaggccccaggcagcccaagagctcagggagccagggaccccaaggggagtccttggacaaggaggcctgggccctgagatcc

SEQ ID NO: 474550 - DNA, 381 bp, Homo sapiens; identical to SEQ ID NO: 379753
  chr11:64621795-64622176
  hypo
  pancreas_gallbladder vs. colorectal,upper_gi

SEQ ID NO: 474551 - DNA, 298 bp, Homo sapiens; identical to SEQ ID NO: 464991
  chr11:64977165-64977463
  hypo
  pancreas_gallbladder vs. breast,melanoma,cervical, head_and_neck,liver_bileduct,lymphoid_neoplasm,renal,sarcoma, prostate,uterine,anorectal,multiple_myeloma,thyroid

SEQ ID NO: 474552 - DNA, 52 bp, Homo sapiens; identical to SEQ ID NO: 348503
  chr11:64977534-64977586
  hypo
  pancreas_gallbladder vs. breast,melanoma,cervical, head_and_neck,liver_bileduct,lymphoid_neoplasm,renal,sarcoma, prostate,uterine,anorectal,multiple_myeloma,thyroid

SEQ ID NO: 474553 - DNA, 95 bp, Homo sapiens; identical to SEQ ID NO: 460014
  chr11:66631185-66631280
  hypo
  pancreas_gallbladder vs. liver_bileduct

SEQ ID NO: 474554 - DNA, 39 bp, Homo sapiens; identical to SEQ ID NO: 379785
  chr11:66631852-66631891
  hypo
  pancreas_gallbladder vs. liver_bileduct

SEQ ID NO: 474555 - DNA, 78 bp, Homo sapiens; identical to SEQ ID NO: 354774
  chr11:68133213-68133291
  hypo
  pancreas_gallbladder vs. liver_bileduct

SEQ ID NO: 474556 - DNA, 139 bp, Homo sapiens; identical to SEQ ID NO: 464998
  chr11:72475539-72475678
  hypo
  pancreas_gallbladder vs. liver_bileduct

SEQ ID NO: 474557 - DNA, 317 bp, Homo sapiens; identical to SEQ ID NO: 365771
  chr11:72475723-72476040
  hypo
  pancreas_gallbladder vs. liver_bileduct

SEQ ID NO: 474558 - DNA, 131 bp, Homo sapiens; identical to SEQ ID NO: 347179
  chr11:106889091-106889222
  hypo
  pancreas_gallbladder vs. head_and_neck,breast,anorectal, lung,melanoma,prostate,sarcoma,ovary,renal,uterine, myeloid_neoplasm,thyroid

SEQ ID NO: 474559 - DNA, 227 bp, Homo sapiens; identical to SEQ ID NO: 462363
  chr11:106889091-106889318
  hypo
  pancreas_gallbladder vs. head_and_neck,breast,melanoma, anorectal,lung,sarcoma,ovary,prostate

SEQ ID NO: 474560 - DNA, 4 bp, Homo sapiens
  chr11:115630408-115630412
  hypo
  pancreas_gallbladder vs. bladder_and_urothelial
cgtc

SEQ ID NO: 474561 - DNA, 79 bp, Homo sapiens; identical to SEQ ID NO: 341257
  chr11:119993701-119993780
  hypo
  pancreas_gallbladder vs. upper_gi

SEQ ID NO: 474562 - DNA, 3 bp, Homo sapiens
  chr11:120384147-120384150
  hypo
tcc

SEQ ID NO: 474563 - DNA, 86 bp, Homo sapiens; identical to SEQ ID NO: 452813
  chr12:4377809-4377895
  hypo
  pancreas_gallbladder vs. lymphoid_neoplasm,colorectal, ovary,non_cancer,myeloid_neoplasm,melanoma,thyroid

SEQ ID NO: 474564 - DNA, 142 bp, Homo sapiens; identical to SEQ ID NO: 452814
  chr12:4378558-4378700
  hypo
  pancreas_gallbladder vs. lymphoid_neoplasm,colorectal, ovary,non_cancer,myeloid_neoplasm,melanoma,thyroid

SEQ ID NO: 474565 - DNA, 245 bp, Homo sapiens; identical to SEQ ID NO: 452815
  chr12:4378558-4378803
  hypo
  pancreas_gallbladder vs. colorectal,lymphoid_neoplasm, non_cancer,melanoma,myeloid_neoplasm,thyroid,ovary, multiple_myeloma

SEQ ID NO: 474566 - DNA, 88 bp, Homo sapiens; identical to SEQ ID NO: 454142
  chr12:4378715-4378803
  hypo
  pancreas_gallbladder vs. colorectal,melanoma, lymphoid_neoplasm,non_cancer,multiple_myeloma

SEQ ID NO: 474567 - DNA, 285 bp, Homo sapiens; identical to SEQ ID NO: 455642
  chr12:4380196-4380481
  hypo
  pancreas_gallbladder vs. colorectal

SEQ ID NO: 474568 - DNA, 266 bp, Homo sapiens; identical to SEQ ID NO: 455643
  chr12:4380215-4380481
  hypo
  pancreas_gallbladder vs. colorectal

SEQ ID NO: 474569 - DNA, 26 bp, Homo sapiens
  chr12:5541693-5541719
  hypo
  pancreas_gallbladder vs. anorectal
ggccgaagcgcaaccgcagccacccc

SEQ ID NO: 474570 - DNA, 323 bp, Homo sapiens; identical to SEQ ID NO: 473677
  chr12:5541693-5542016
  hypo
  pancreas_gallbladder vs. head_and_neck,ovary

SEQ ID NO: 474571 - DNA, 239 bp, Homo sapiens; identical to SEQ ID NO: 473678
  chr12:5541777-5542016
  hypo

SEQ ID NO: 474572 - DNA, 117 bp, Homo sapiens; identical to SEQ ID NO: 347220
  chr12:21681020-21681137
  hypo
  pancreas_gallbladder vs. ovary,renal,breast,uterine, prostate,sarcoma,myeloid_neoplasm,thyroid,non_cancer,lung, bladder_and_urothelial,multiple_myeloma,melanoma,liver_bileduct

SEQ ID NO: 474573 - DNA, 6 bp, Homo sapiens
  chr12:22488262-22488268
  hypo
  pancreas_gallbladder vs. head_and_neck,sarcoma,anorectal, lung,breast,bladder_and_urothelial,ovary,renal,uterine, non_cancer
gcgccc

SEQ ID NO: 474574 - DNA, 118 bp, Homo sapiens; identical to SEQ ID NO: 347221
  chr12:22488705-22488823
  hypo
  pancreas_gallbladder vs. head_and_neck,lung,anorectal, breast,sarcoma,renal,bladder_and_urothelial,prostate,ovary

SEQ ID NO: 474575 - DNA, 253 bp, Homo sapiens; identical to SEQ ID NO: 459373
  chr12:24715505-24715758
  hypo
  pancreas_gallbladder vs. lung,anorectal,multiple_myeloma, sarcoma

SEQ ID NO: 474576 - DNA, 253 bp, Homo sapiens; identical to SEQ ID NO: 459373
  chr12:24715505-24715758
  hypo
  pancreas_gallbladder vs. lung,sarcoma,multiple_myeloma, anorectal,breast

SEQ ID NO: 474577 - DNA, 37 bp, Homo sapiens; identical to SEQ ID NO: 454682
  chr12:32831540-32831577
  hypo
  pancreas_gallbladder vs. colorectal,head_and_neck

SEQ ID NO: 474578 - DNA, 77 bp, Homo sapiens; identical to SEQ ID NO: 452819
  chr12:40618264-40618341
  hypo
  pancreas_gallbladder vs. liver_bileduct

SEQ ID NO: 474579 - DNA, 35 bp, Homo sapiens; identical to SEQ ID NO: 351336
  chr12:40619048-40619083
  hypo
  pancreas_gallbladder vs. liver_bileduct

SEQ ID NO: 474580 - DNA, 409 bp, Homo sapiens; identical to SEQ ID NO: 457434
  chr12:48577061-48577470
  hypo
  pancreas_gallbladder vs. anorectal,sarcoma

SEQ ID NO: 474581 - DNA, 3 bp, Homo sapiens
  chr12:49363675-49363678
  hypo
  pancreas_gallbladder vs. upper_gi
cgc

SEQ ID NO: 474582 - DNA, 61 bp, Homo sapiens; identical to SEQ ID NO: 473693
  chr12:49364178-49364239
  hypo
  pancreas_gallbladder vs. upper_gi

SEQ ID NO: 474583 - DNA, 3 bp, Homo sapiens
  chr12:52401537-52401540
  hypo
  pancreas_gallbladder vs. anorectal,melanoma, head_and_neck
tcc

SEQ ID NO: 474584 - DNA, 104 bp, Homo sapiens; identical to SEQ ID NO: 464141
  chr12:54393256-54393360
  hypo
  pancreas_gallbladder vs. upper_gi

SEQ ID NO: 474585 - DNA, 265 bp, Homo sapiens; identical to SEQ ID NO: 468722
  chr12:93966037-93966302
  hypo
  pancreas_gallbladder vs. anorectal,colorectal

SEQ ID NO: 474586 - DNA, 373 bp, Homo sapiens; identical to SEQ ID NO: 457459
  chr12:94542716-94543089
  hypo
  pancreas_gallbladder vs. sarcoma,prostate,non_cancer, thyroid,melanoma,multiple_myeloma

SEQ ID NO: 474587 - DNA, 31 bp, Homo sapiens; identical to SEQ ID NO: 452825
  chr12:94543992-94544023
  hypo
  pancreas_gallbladder vs. thyroid,non_cancer, multiple_myeloma,sarcoma,melanoma,prostate

SEQ ID NO: 474588 - DNA, 86 bp, Homo sapiens; identical to SEQ ID NO: 345430
  chr12:94544052-94544138
  hypo
  pancreas_gallbladder vs. thyroid,non_cancer, multiple_myeloma,sarcoma,melanoma,prostate

SEQ ID NO: 474589 - DNA, 292 bp, Homo sapiens; identical to SEQ ID NO: 453632
  chr12:113725566-113725858
  hypo
  pancreas_gallbladder vs. liver_bileduct

SEQ ID NO: 474590 - DNA, 336 bp, Homo sapiens; identical to SEQ ID NO: 465046
  chr12:120148396-120148732
  hypo
  pancreas_gallbladder vs. liver_bileduct

SEQ ID NO: 474591 - DNA, 96 bp, Homo sapiens; identical to SEQ ID NO: 341552
  chr12:120543024-120543120
  hypo
  pancreas_gallbladder vs. liver_bileduct

SEQ ID NO: 474592 - DNA, 137 bp, Homo sapiens
  chr12:120580310-120580447
  hypo
cgttctcttatctgcacacgtgctggccaggaaacccagcaggagcccaaagagagtgggtaggatctcacgcaaggtgcggggggtattggagacaacaatcttccagacatgcagggacgcctgccgcaccacca

SEQ ID NO: 474593 - DNA, 15 bp, Homo sapiens
  chr12:120580509-120580524
  hypo
agggcagtgatgatc

SEQ ID NO: 474594 - DNA, 704 bp, Homo sapiens; identical to SEQ ID NO: 453635
  chr12:121687598-121688302
  hypo
  pancreas_gallbladder vs. liver_bileduct

SEQ ID NO: 474595 - DNA, 239 bp, Homo sapiens; identical to SEQ ID NO: 348574
  chr12:121688331-121688570
  hypo
  pancreas_gallbladder vs. liver_bileduct

SEQ ID NO: 474596 - DNA, 458 bp, Homo sapiens; identical to SEQ ID NO: 341580
  chr12:122614584-122615042
  hypo
  pancreas_gallbladder vs. breast,prostate,colorectal, multiple_myeloma,lymphoid_neoplasm,upper_gi

SEQ ID NO: 474597 - DNA, 255 bp, Homo sapiens; identical to SEQ ID NO: 341589
  chr12:123434339-123434594
  hypo
  pancreas_gallbladder vs. liver_bileduct

SEQ ID NO: 474598 - DNA, 203 bp, Homo sapiens; identical to SEQ ID NO: 341590
  chr12:123434957-123435160
  hypo
  pancreas_gallbladder vs. liver_bileduct

SEQ ID NO: 474599 - DNA, 171 bp, Homo sapiens
  chr12:124869706-124869877
  hypo
  pancreas_gallbladder vs. upper_gi
cgctggcgaggcgagcctgcaccttctgtgcttgtggaggagggaagggtctcagcctcccgtggcctgcctcaagccctccaggatgctggggctgagacgtccgcccccgcccccccagacctgtccctccccaaccacggcagccctaaagctgtgaggtcaaatggg

SEQ ID NO: 474600 - DNA, 326 bp, Homo sapiens; identical to SEQ ID NO: 366123
  chr12:124870152-124870478
  hypo
  pancreas_gallbladder vs. upper_gi

SEQ ID NO: 474601 - DNA, 406 bp, Homo sapiens; identical to SEQ ID NO: 460689
  chr12:128750713-128751119
  hypo
  pancreas_gallbladder vs. melanoma

SEQ ID NO: 474602 - DNA, 129 bp, Homo sapiens; identical to SEQ ID NO: 348587
  chr12:132222124-132222253
  hypo
  pancreas_gallbladder vs. colorectal,lymphoid_neoplasm, multiple_myeloma

SEQ ID NO: 474603 - DNA, 500 bp, Homo sapiens; identical to SEQ ID NO: 366195
  chr12:133121644-133122144
  hypo
  pancreas_gallbladder vs. melanoma

SEQ ID NO: 474604 - DNA, 767 bp, Homo sapiens
  chr12:133353501-133354268
  hypo
  pancreas_gallbladder vs. upper_gi
cgtgagtccagccctgcaagtccagcccccgtgaaccgtcacctcttggtttcccacgggctgtttgctgagctgctcgtccagctgcttctgcaggagctggagctgtgcccgggcctcggccagctctgcttggaactgtgctatctcctgggaatgtttcccctcccgaatcctagcgtaaaaaaacaagaaagaagggaatcgccacgctcctccagtgtgctgtgccctcccgctgggaaatgctgcctgtggaaggcgttcgtcctggcaggccctctgctgtgcactgcgtgctgcagccatgcttggtgcccacagtgtgcactcgggcagtcctcacgaagcacctgagactcacacttcactggcacccctcacagatcccagagactcactttgccggcacccctcacagatcccagagagtgccggccccgagaccacagtgcatgggacccacagagccacagcatcagccccgcgccgggccgccccttcccgcctctgacctgaagctaagtactcctgctggggcgctttctctcttggggggaggacacggggcagtgagtgaggctcaggattctggagacggaggctgggtgccttctactcctatgattcactcaagtactcggcaatttgcaaaatatagatgaccctcgctgtgctgaaggtgtgaattagaccccgcccattgccaggacagccatgtttgagggctggcggggcccaggcactcactgaaggtcgtcggcctc

SEQ ID NO: 474605 - DNA, 776 bp, Homo sapiens
  chr12:133353796-133354572
  hypo
  pancreas_gallbladder vs. upper_gi
cgtgctgcagccatgcttggtgcccacagtgtgcactcgggcagtcctcacgaagcacctgagactcacacttcactggcacccctcacagatcccagagactcactttgccggcacccctcacagatcccagagagtgccggccccgagaccacagtgcatgggacccacagagccacagcatcagccccgcgccgggccgccccttcccgcctctgacctgaagctaagtactcctgctggggcgctttctctcttggggggaggacacggggcagtgagtgaggctcaggattctggagacggaggctgggtgccttctactcctatgattcactcaagtactcggcaatttgcaaaatatagatgaccctcgctgtgctgaaggtgtgaattagaccccgcccattgccaggacagccatgtttgagggctggcggggcccaggcactcactgaaggtcgtcggcctcggcctgcagcttctgcaccaggtgttccttggcctgcagctccttcttcacctcactcagctccaaggaggccgccttgaagtggcggcggttatgcccggcttccaccttggcagcagccacctaggaggaaggaagccacgttgtccatgccctgcgtgacacccacagctttatgacgtgccgggcgcagggggtgaatgcactcccggccccgtgcatgtcctggctgccggcgtgtgcttctccacaggcctgtcaagttccttgtaaagatgaaaccacctgacccggagctcggcac

SEQ ID NO: 474606 - DNA, 168 bp, Homo sapiens; identical to SEQ ID NO: 462415
  chr13:20735265-20735433
  hypo
  pancreas_gallbladder vs. cervical,head_and_neck,upper_gi, uterine

SEQ ID NO: 474607 - DNA, 309 bp, Homo sapiens; identical to SEQ ID NO: 355041
  chr13:30707770-30708079
  hypo
  pancreas_gallbladder vs. liver_bileduct,renal,melanoma, breast,lung,anorectal,head_and_neck,cervical,uterine

SEQ ID NO: 474608 - DNA, 23 bp, Homo sapiens
  chr13:37005451-37005474
  hypo
  pancreas_gallbladder vs. ovary,lung,renal,uterine,breast, bladder_and_urothelial,sarcoma,thyroid,myeloid_neoplasm, prostate,cervical,non_cancer
cgattatttcacctggcttgtca

SEQ ID NO: 474609 - DNA, 112 bp, Homo sapiens; identical to SEQ ID NO: 366229
  chr13:43543227-43543339
  hypo
  pancreas_gallbladder vs. lymphoid_neoplasm

SEQ ID NO: 474610 - DNA, 146 bp, Homo sapiens; identical to SEQ ID NO: 380381
  chr13:45926346-45926492
  hypo
  pancreas_gallbladder vs. lymphoid_neoplasm

SEQ ID NO: 474611 - DNA, 387 bp, Homo sapiens; identical to SEQ ID NO: 373304
  chr13:95360413-95360800
  hypo
  pancreas_gallbladder vs. renal

SEQ ID NO: 474612 - DNA, 401 bp, Homo sapiens; identical to SEQ ID NO: 460078
  chr13:111277855-111278256
  hypo
  pancreas_gallbladder vs. liver_bileduct,renal,melanoma, cervical,lymphoid_neoplasm

SEQ ID NO: 474613 - DNA, 278 bp, Homo sapiens; identical to SEQ ID NO: 355077
  chr13:111278426-111278704
  hypo
  pancreas_gallbladder vs. liver_bileduct,renal,melanoma, cervical,lymphoid_neoplasm

SEQ ID NO: 474614 - DNA, 270 bp, Homo sapiens
  chr13:111330283-111330553
  hypo
  pancreas_gallbladder vs. upper_gi
cggccaccccggtggaagcccctccagccgccagtgggcagcacgccccaggctgtgtctcttcgaaggagccttggcttctcgttcactcctgtttcacccacgtgagggacaggagcaccggcaacgctttcacctcagatgcaccagcgcacagggagagctgggcggccgggaacccacagaggctcatttctcaggaatgtactgtggaccaggtggggttttcccatttttccttattctgtcttacgagaaatactctgctta

SEQ ID NO: 474615 - DNA, 123 bp, Homo sapiens; identical to SEQ ID NO: 341806
  chr13:113244578-113244701
  hypo
  pancreas_gallbladder vs. lung,head_and_neck,colorectal

SEQ ID NO: 474616 - DNA, 137 bp, Homo sapiens; identical to SEQ ID NO: 341811
  chr13:113369414-113369551
  hypo
  pancreas_gallbladder vs. cervical,colorectal,melanoma, head_and_neck,anorectal

SEQ ID NO: 474617 - DNA, 251 bp, Homo sapiens; identical to SEQ ID NO: 341812
  chr13:113379254-113379505
  hypo
  pancreas_gallbladder vs. upper_gi

SEQ ID NO: 474618 - DNA, 45 bp, Homo sapiens; identical to SEQ ID NO: 454739
  chr13:113985425-113985470
  hypo
  pancreas_gallbladder vs. liver_bileduct

SEQ ID NO: 474619 - DNA, 87 bp, Homo sapiens; identical to SEQ ID NO: 463344
  chr13:114769900-114769987
  hypo
  pancreas_gallbladder vs. renal,melanoma,cervical,breast, lymphoid_neoplasm

SEQ ID NO: 474620 - DNA, 2 bp, Homo sapiens
  chr13:114770192-114770194
  hypo
  pancreas_gallbladder vs. renal,melanoma,cervical,breast, lymphoid_neoplasm
ac

SEQ ID NO: 474621 - DNA, 5 bp, Homo sapiens
  chr13:114961716-114961721
  hypo
  pancreas_gallbladder vs. colorectal,cervical,melanoma, head_and_neck,breast,anorectal,sarcoma,lymphoid_neoplasm
cggat

SEQ ID NO: 474622 - DNA, 78 bp, Homo sapiens; identical to SEQ ID NO: 351523
  chr14:23835314-23835392
  hypo
  pancreas_gallbladder vs. head_and_neck,anorectal

SEQ ID NO: 474623 - DNA, 56 bp, Homo sapiens; identical to SEQ ID NO: 458616
  chr14:32597657-32597713
  hypo
  pancreas_gallbladder vs. colorectal,upper_gi,melanoma, lymphoid_neoplasm

SEQ ID NO: 474624 - DNA, 150 bp, Homo sapiens; identical to SEQ ID NO: 462438
  chr14:36003293-36003443
  hypo
  pancreas_gallbladder vs. prostate,head_and_neck,thyroid, breast

SEQ ID NO: 474625 - DNA, 215 bp, Homo sapiens; identical to SEQ ID NO: 473766
  chr14:51562012-51562227
  hypo
  pancreas_gallbladder vs. renal

SEQ ID NO: 474626 - DNA, 291 bp, Homo sapiens; identical to SEQ ID NO: 366390
  chr14:65233479-65233770
  hypo
  pancreas_gallbladder vs. liver_bileduct

SEQ ID NO: 474627 - DNA, 9 bp, Homo sapiens
  chr14:70654358-70654367
  hypo
  pancreas_gallbladder vs. multiple_myeloma,thyroid, non_cancer,sarcoma,renal
cgcgcgcgc

SEQ ID NO: 474628 - DNA, 103 bp, Homo sapiens; identical to SEQ ID NO: 341966
  chr14:73967299-73967402
  hypo
  pancreas_gallbladder vs. upper_gi,melanoma

SEQ ID NO: 474629 - DNA, 160 bp, Homo sapiens; identical to SEQ ID NO: 454771
  chr14:93154728-93154888
  hypo
  pancreas_gallbladder vs. melanoma,lymphoid_neoplasm

SEQ ID NO: 474630 - DNA, 237 bp, Homo sapiens; identical to SEQ ID NO: 454772
  chr14:93706483-93706720
  hypo
  pancreas_gallbladder vs. breast

SEQ ID NO: 474631 - DNA, 124 bp, Homo sapiens
  chr14:99849764-99849888
  hypo
  pancreas_gallbladder vs. liver_bileduct
cgaaggcaggggaagggacgacgcatttggaggaagcaccatccgagccacaccccgcacagaaaaaggacccaggcccacggcaaggcgcttcttggtcctttcggaagggccgctcctaaac

SEQ ID NO: 474632 - DNA, 286 bp, Homo sapiens; identical to SEQ ID NO: 355174
  chr14:99850063-99850349
  hypo
  pancreas_gallbladder vs. liver_bileduct

SEQ ID NO: 474633 - DNA, 129 bp, Homo sapiens; identical to SEQ ID NO: 460097
  chr14:100644271-100644400
  hypo
  pancreas_gallbladder vs. cervical,lymphoid_neoplasm, melanoma

SEQ ID NO: 474634 - DNA, 1 bp, Homo sapiens
  chr14:102500433-102500434
  hypo
  pancreas_gallbladder vs. upper_gi
c

SEQ ID NO: 474635 - DNA, 492 bp, Homo sapiens; identical to SEQ ID NO: 355185
  chr14:102500550-102501042
  hypo
  pancreas_gallbladder vs. upper_gi

SEQ ID NO: 474636 - DNA, 323 bp, Homo sapiens; identical to SEQ ID NO: 454191
  chr14:103988832-103989155
  hypo
  pancreas_gallbladder vs. head_and_neck

SEQ ID NO: 474637 - DNA, 124 bp, Homo sapiens; identical to SEQ ID NO: 373565
  chr14:103989597-103989721
  hypo
  pancreas_gallbladder vs. head_and_neck

SEQ ID NO: 474638 - DNA, 121 bp, Homo sapiens; identical to SEQ ID NO: 456499
  chr14:104159197-104159318
  hypo
  pancreas_gallbladder vs. liver_bileduct

SEQ ID NO: 474639 - DNA, 106 bp, Homo sapiens; identical to SEQ ID NO: 355199
  chr14:104159437-104159543
  hypo
  pancreas_gallbladder vs. liver_bileduct

SEQ ID NO: 474640 - DNA, 130 bp, Homo sapiens; identical to SEQ ID NO: 456501
  chr14:104159892-104160022
  hypo
  pancreas_gallbladder vs. liver_bileduct

SEQ ID NO: 474641 - DNA, 3 bp, Homo sapiens
  chr14:104160058-104160061
  hypo
  pancreas_gallbladder vs. liver_bileduct
cct

SEQ ID NO: 474642 - DNA, 123 bp, Homo sapiens; identical to SEQ ID NO: 355201
  chr14:104160134-104160257
  hypo
  pancreas_gallbladder vs. liver_bileduct

SEQ ID NO: 474643 - DNA, 85 bp, Homo sapiens; identical to SEQ ID NO: 355221
  chr14:105472075-105472160
  hypo
  pancreas_gallbladder vs. liver_bileduct

SEQ ID NO: 474644 - DNA, 3 bp, Homo sapiens
  chr15:34728787-34728790
  hypo
  pancreas_gallbladder vs. cervical,head_and_neck, anorectal
cgc

SEQ ID NO: 474645 - DNA, 12 bp, Homo sapiens
  chr15:34728813-34728825
  hypo
  pancreas_gallbladder vs. cervical,head_and_neck, anorectal
cgcgtcggcccg

SEQ ID NO: 474646 - DNA, 25 bp, Homo sapiens
  chr15:34729636-34729661
  hypo
  pancreas_gallbladder vs. cervical,head_and_neck, anorectal
ctcgccgcgccgccgtcctcgccgc

SEQ ID NO: 474647 - DNA, 47 bp, Homo sapiens; identical to SEQ ID NO: 462466
  chr15:34729898-34729945
  hypo
  pancreas_gallbladder vs. head_and_neck

SEQ ID NO: 474648 - DNA, 89 bp, Homo sapiens; identical to SEQ ID NO: 473781
  chr15:35046519-35046608
  hypo
  pancreas_gallbladder vs. melanoma

SEQ ID NO: 474649 - DNA, 182 bp, Homo sapiens; identical to SEQ ID NO: 473782
  chr15:35046689-35046871
  hypo
  pancreas_gallbladder vs. melanoma

SEQ ID NO: 474650 - DNA, 518 bp, Homo sapiens; identical to SEQ ID NO: 342157
  chr15:40631683-40632201
  hypo
  pancreas_gallbladder vs. upper_gi

SEQ ID NO: 474651 - DNA, 88 bp, Homo sapiens; identical to SEQ ID NO: 458640
  chr15:41091052-41091140
  hypo
  pancreas_gallbladder vs. liver_bileduct, lymphoid_neoplasm

SEQ ID NO: 474652 - DNA, 89 bp, Homo sapiens; identical to SEQ ID NO: 342165
  chr15:45440539-45440628
  hypo
  pancreas_gallbladder vs. upper_gi

SEQ ID NO: 474653 - DNA, 78 bp, Homo sapiens; identical to SEQ ID NO: 452897
  chr15:48936649-48936727
  hypo
  pancreas_gallbladder vs. sarcoma

SEQ ID NO: 474654 - DNA, 186 bp, Homo sapiens; identical to SEQ ID NO: 473784
  chr15:52404388-52404574
  hypo
  pancreas_gallbladder vs. upper_gi

SEQ ID NO: 474655 - DNA, 201 bp, Homo sapiens; identical to SEQ ID NO: 342194
  chr15:62747468-62747669
  hypo
  pancreas_gallbladder vs. upper_gi

SEQ ID NO: 474656 - DNA, 1 bp, Homo sapiens
  chr15:67545486-67545487
  hypo
  pancreas_gallbladder vs. lymphoid_neoplasm
c

SEQ ID NO: 474657 - DNA, 195 bp, Homo sapiens; identical to SEQ ID NO: 462486
  chr15:82339684-82339879
  hypo
  pancreas_gallbladder vs. ovary,anorectal

SEQ ID NO: 474658 - DNA, 184 bp, Homo sapiens; identical to SEQ ID NO: 453668
  chr15:90755573-90755757
  hypo
  pancreas_gallbladder vs. liver_bileduct

SEQ ID NO: 474659 - DNA, 42 bp, Homo sapiens; identical to SEQ ID NO: 366658
  chr15:90756079-90756121
  hypo
  pancreas_gallbladder vs. liver_bileduct

SEQ ID NO: 474660 - DNA, 9 bp, Homo sapiens
  chr16:323599-323608
  hypo
  pancreas_gallbladder vs. melanoma
agcccctcc

SEQ ID NO: 474661 - DNA, 15 bp, Homo sapiens
  chr16:1202573-1202588
  hypo
  pancreas_gallbladder vs. upper_gi
gcggggaaggggcac

SEQ ID NO: 474662 - DNA, 233 bp, Homo sapiens; identical to SEQ ID NO: 471702
  chr16:1493342-1493575
  hypo
  pancreas_gallbladder vs. liver_bileduct

SEQ ID NO: 474663 - DNA, 563 bp, Homo sapiens; identical to SEQ ID NO: 355355
  chr16:1493691-1494254
  hypo
  pancreas_gallbladder vs. liver_bileduct

SEQ ID NO: 474664 - DNA, 107 bp, Homo sapiens
  chr16:1724902-1725009
  hypo
  pancreas_gallbladder vs. upper_gi
cgctaatatgattacagcgaagactttcctgataagttctcaaactcgatgtgtgactgtttggcacttgagacaaacctgcctttgcagggaaagtgtctctcacg

SEQ ID NO: 474665 - DNA, 366 bp, Homo sapiens; identical to SEQ ID NO: 381024
  chr16:1725038-1725404
  hypo
  pancreas_gallbladder vs. upper_gi

SEQ ID NO: 474666 - DNA, 868 bp, Homo sapiens
  chr16:1796052-1796920
  hypo
  pancreas_gallbladder vs. upper_gi
cggtgcgccctctgagagaccacgggaacccacccagcggctgcctgggacaggcacaggagccacctgggtgcctctgaggccttgcactttcccacacctcaaggagggccgggggccacgggcaagctctgccatagcgggtgatcaggtcagctaagacgagaacgtttggggctctttttctccagctggttcagtatctttgttaggaaagaccattggaaagaatgtttgtttcgcattccgcattagtcacatagaatgcgctcctccctagcgagcttcctgaggtagacggctggttgcggtttctcgtaatccgggctgcccccaccctccagaatgtcttggtggcgtccctttctgtgagcagggattgtggtttctttgcgcttgctcatgttcaggggtgagctctggtccagtcaagccacagggtcagcaccttctggtcactccctggccctgacctgagcccggggaggaacgtggggcaggcgcgggtgggcccagcctcgagctcttcagcacagtgatggtgacggggcagcggtggcggcacagccagcccttcttgggtccccagtcagagccctctgccctacctgggctggacttgtttctgaacagccacaagctacagggggctgccgctgtgtccctggcgaggcactggcccattacaagcaatcgtctggggagggcaccagtggaaagccccgttccaagccatttcaggagggtggccctgcttccgaggagccggagtcagtggccggataagcagagccactcgggagtggtgaggcccggaagggttagcccggtgggcggcagaggagctctggcccgcagggtgtcgggc

SEQ ID NO: 474667 - DNA, 1 bp, Homo sapiens
  chr16:2029207-2029208
  hypo
  pancreas_gallbladder vs. lymphoid_neoplasm,melanoma
c

SEQ ID NO: 474668 - DNA, 48 bp, Homo sapiens; identical to SEQ ID NO: 345484
  chr16:2042503-2042551
  hypo
  pancreas_gallbladder vs. anorectal,non_cancer

SEQ ID NO: 474669 - DNA, 50 bp, Homo sapiens; identical to SEQ ID NO: 460116
  chr16:2141860-2141910
  hypo
  pancreas_gallbladder vs. melanoma,breast,liver_bileduct, lymphoid_neoplasm,renal,bladder_and_urothelial

SEQ ID NO: 474670 - DNA, 575 bp, Homo sapiens; identical to SEQ ID NO: 460117
  chr16:2141972-2142547
  hypo
  pancreas_gallbladder vs. melanoma,breast,liver_bileduct, lymphoid_neoplasm,renal,bladder_and_urothelial

SEQ ID NO: 474671 - DNA, 25 bp, Homo sapiens
  chr16:2142628-2142653
  hypo
  pancreas_gallbladder vs. melanoma,breast,liver_bileduct, lymphoid_neoplasm,renal,bladder_and_urothelial
tgccccatgcccgcctcgagtgagc

SEQ ID NO: 474672 - DNA, 335 bp, Homo sapiens; identical to SEQ ID NO: 460119
  chr16:2142212-2142547
  hypo
  pancreas_gallbladder vs. melanoma,breast, lymphoid_neoplasm,liver_bileduct,renal,bladder_and_urothelial, prostate,multiple_myeloma

SEQ ID NO: 474673 - DNA, 391 bp, Homo sapiens; identical to SEQ ID NO: 355378
  chr16:2142628-2143019
  hypo
  pancreas_gallbladder vs. melanoma,breast, lymphoid_neoplasm,liver_bileduct,renal,bladder_and_urothelial, prostate,multiple_myeloma

SEQ ID NO: 474674 - DNA, 152 bp, Homo sapiens; identical to SEQ ID NO: 366791
  chr16:2235039-2235191
  hypo
  pancreas_gallbladder vs. uterine

SEQ ID NO: 474675 - DNA, 305 bp, Homo sapiens; identical to SEQ ID NO: 452909
  chr16:3208795-3209100
  hypo
  pancreas_gallbladder vs. upper_gi

SEQ ID NO: 474676 - DNA, 226 bp, Homo sapiens; identical to SEQ ID NO: 342464
  chr16:4513533-4513759
  hypo
  pancreas_gallbladder vs. liver_bileduct

SEQ ID NO: 474677 - DNA, 161 bp, Homo sapiens; identical to SEQ ID NO: 456550
  chr16:4845976-4846137
  hypo
  pancreas_gallbladder vs. renal,melanoma,sarcoma

SEQ ID NO: 474678 - DNA, 65 bp, Homo sapiens; identical to SEQ ID NO: 460122
  chr16:9005277-9005342
  hypo
  pancreas_gallbladder vs. liver_bileduct,cervical, head_and_neck

SEQ ID NO: 474679 - DNA, 22 bp, Homo sapiens
  chr16:9062199-9062221
  hypo
  pancreas_gallbladder vs. liver_bileduct
gttggccagtgcattcgctcac

SEQ ID NO: 474680 - DNA, 263 bp, Homo sapiens; identical to SEQ ID NO: 460124
  chr16:15820563-15820826
  hypo
  pancreas_gallbladder vs. head_and_neck

SEQ ID NO: 474681 - DNA, 95 bp, Homo sapiens; identical to SEQ ID NO: 458678
  chr16:18804320-18804415
  hypo
  pancreas_gallbladder vs. breast,lymphoid_neoplasm, prostate

SEQ ID NO: 474682 - DNA, 10 bp, Homo sapiens
  chr16:23846783-23846793
  hypo
  pancreas_gallbladder vs. thyroid,myeloid_neoplasm, non_cancer,melanoma,bladder_and_urothelial,multiple_myeloma, prostate,cervical,lymphoid_neoplasm
cgctcctccc

SEQ ID NO: 474683 - DNA, 19 bp, Homo sapiens
  chr16:30124861-30124880
  hypo
  pancreas_gallbladder vs. melanoma,lymphoid_neoplasm
tgcctagccagtgtgggcc

SEQ ID NO: 474684 - DNA, 305 bp, Homo sapiens; identical to SEQ ID NO: 462510
  chr16:47176468-47176773
  hypo
  pancreas_gallbladder vs. cervical,head_and_neck,lung

SEQ ID NO: 474685 - DNA, 1 bp, Homo sapiens
  chr16:47177759-47177760
  hypo
  pancreas_gallbladder vs. head_and_neck,cervical, bladder_and_urothelial,anorectal
c

SEQ ID NO: 474686 - DNA, 400 bp, Homo sapiens
  chr16:50335368-50335768
  hypo
  pancreas_gallbladder vs. lymphoid_neoplasm
cgagcgaggccttcacagtgcgcctggcacgtcacagcattctatgtattctcgtcactcttggtttattttccatgaggtggttattaatctcccagatttccgagagacacactttcaaaacaagctttggatgaaactcaggaaagcagggagtggcctgggagccactgggcaggagcctctgagtgtcctgggtgctgactgcaggtcccctggtggctccaggaccccacggtggaggaggcagttccactgccctggccaggtggggcccgccttggcctgtctgctgcccgaccctggcctgcttcagggagtccggcacgtctggccacttctctgtgaatcatccatgaggcttgctcaagaatgtcggcccagccagcgagtggctcct

SEQ ID NO: 474687 - DNA, 190 bp, Homo sapiens; identical to SEQ ID NO: 366918
  chr16:50335818-50336008
  hypo
  pancreas_gallbladder vs. lymphoid_neoplasm

SEQ ID NO: 474688 - DNA, 61 bp, Homo sapiens; identical to SEQ ID NO: 473829
  chr16:56225663-56225724
  hypo
  pancreas_gallbladder vs. anorectal,head_and_neck

SEQ ID NO: 474689 - DNA, 61 bp, Homo sapiens; identical to SEQ ID NO: 473829
  chr16:56225663-56225724
  hypo
  pancreas_gallbladder vs. anorectal,head_and_neck,breast

SEQ ID NO: 474690 - DNA, 269 bp, Homo sapiens; identical to SEQ ID NO: 473831
  chr16:56225881-56226150
  hypo
  pancreas_gallbladder vs. anorectal,head_and_neck,breast

SEQ ID NO: 474691 - DNA, 86 bp, Homo sapiens; identical to SEQ ID NO: 459452
  chr16:56228284-56228370
  hypo
  pancreas_gallbladder vs. ovary,breast,uterine

SEQ ID NO: 474692 - DNA, 57 bp, Homo sapiens; identical to SEQ ID NO: 351808
  chr16:56228591-56228648
  hypo
  pancreas_gallbladder vs. ovary,breast,uterine

SEQ ID NO: 474693 - DNA, 134 bp, Homo sapiens; identical to SEQ ID NO: 345495
  chr16:68118915-68119049
  hypo
  pancreas_gallbladder vs. upper_gi,cervical,anorectal, liver_bileduct,lung,colorectal,uterine,non_cancer, lymphoid_neoplasm,head_and_neck,multiple_myeloma, bladder_and_urothelial

SEQ ID NO: 474694 - DNA, 27 bp, Homo sapiens
  chr16:68386080-68386107
  hypo
  pancreas_gallbladder vs. renal
cgtgttcctgttaacactcctggaccg

SEQ ID NO: 474695 - DNA, 167 bp, Homo sapiens; identical to SEQ ID NO: 355475
  chr16:68386187-68386354
  hypo
  pancreas_gallbladder vs. renal

SEQ ID NO: 474696 - DNA, 82 bp, Homo sapiens; identical to SEQ ID NO: 204296
  chr16:77246930-77247012
  hypo
  pancreas_gallbladder vs. cervical,lung,head_and_neck

SEQ ID NO: 474697 - DNA, 205 bp, Homo sapiens; identical to SEQ ID NO: 457590
  chr16:77247511-77247716
  hypo
  pancreas_gallbladder vs. upper_gi,colorectal

SEQ ID NO: 474698 - DNA, 81 bp, Homo sapiens; identical to SEQ ID NO: 360874
  chr16:77469120-77469201
  hypo
  pancreas_gallbladder vs. breast,prostate

SEQ ID NO: 474699 - DNA, 49 bp, Homo sapiens; identical to SEQ ID NO: 452920
  chr16:77822069-77822118
  hypo
  pancreas_gallbladder vs. sarcoma,renal,lung,ovary, multiple_myeloma,thyroid,prostate,breast

SEQ ID NO: 474700 - DNA, 261 bp, Homo sapiens; identical to SEQ ID NO: 453712
  chr16:81563939-81564200
  hypo
  pancreas_gallbladder vs. upper_gi,colorectal

SEQ ID NO: 474701 - DNA, 163 bp, Homo sapiens; identical to SEQ ID NO: 453713
  chr16:81564229-81564392
  hypo
  pancreas_gallbladder vs. upper_gi,colorectal

SEQ ID NO: 474702 - DNA, 240 bp, Homo sapiens; identical to SEQ ID NO: 355499
  chr16:81564541-81564781
  hypo
  pancreas_gallbladder vs. upper_gi,colorectal

SEQ ID NO: 474703 - DNA, 92 bp, Homo sapiens; identical to SEQ ID NO: 355506
  chr16:85033902-85033994
  hypo
  pancreas_gallbladder vs. lymphoid_neoplasm,melanoma, liver_bileduct,multiple_myeloma,renal,colorectal

SEQ ID NO: 474704 - DNA, 65 bp, Homo sapiens; identical to SEQ ID NO: 367016
  chr16:85464302-85464367
  hypo

SEQ ID NO: 474705 - DNA, 114 bp, Homo sapiens; identical to SEQ ID NO: 367027
  chr16:85679455-85679569
  hypo
  pancreas_gallbladder vs. lymphoid_neoplasm,melanoma

SEQ ID NO: 474706 - DNA, 303 bp, Homo sapiens; identical to SEQ ID NO: 342715
  chr16:86665890-86666193
  hypo
  pancreas_gallbladder vs. colorectal

SEQ ID NO: 474707 - DNA, 60 bp, Homo sapiens; identical to SEQ ID NO: 462521
  chr16:87635912-87635972
  hypo
  pancreas_gallbladder vs. melanoma

SEQ ID NO: 474708 - DNA, 190 bp, Homo sapiens; identical to SEQ ID NO: 462522
  chr16:87636008-87636198
  hypo
  pancreas_gallbladder vs. melanoma

SEQ ID NO: 474709 - DNA, 491 bp, Homo sapiens; identical to SEQ ID NO: 127736
  chr16:87902835-87903326
  hypo
  pancreas_gallbladder vs. upper_gi

SEQ ID NO: 474710 - DNA, 126 bp, Homo sapiens; identical to SEQ ID NO: 342733
  chr16:87934247-87934373
  hypo
  pancreas_gallbladder vs. colorectal

SEQ ID NO: 474711 - DNA, 136 bp, Homo sapiens; identical to SEQ ID NO: 342735
  chr16:88048979-88049115
  hypo
  pancreas_gallbladder vs. liver_bileduct

SEQ ID NO: 474712 - DNA, 219 bp, Homo sapiens; identical to SEQ ID NO: 342758
  chr16:88892602-88892821
  hypo
  pancreas_gallbladder vs. liver_bileduct

SEQ ID NO: 474713 - DNA, 400 bp, Homo sapiens; identical to SEQ ID NO: 462524
  chr16:89006909-89007309
  hypo
  pancreas_gallbladder vs. sarcoma,breast

SEQ ID NO: 474714 - DNA, 92 bp, Homo sapiens; identical to SEQ ID NO: 462526
  chr16:89007789-89007881
  hypo
  pancreas_gallbladder vs. melanoma,breast

SEQ ID NO: 474715 - DNA, 374 bp, Homo sapiens; identical to SEQ ID NO: 462529
  chr16:89007995-89008369
  hypo
  pancreas_gallbladder vs. melanoma,breast

SEQ ID NO: 474716 - DNA, 7 bp, Homo sapiens
  chr16:89008592-89008599
  hypo
  pancreas_gallbladder vs. melanoma,breast
cccgccc

SEQ ID NO: 474717 - DNA, 542 bp, Homo sapiens; identical to SEQ ID NO: 342780
  chr16:89169538-89170080
  hypo
  pancreas_gallbladder vs. head_and_neck,anorectal

SEQ ID NO: 474718 - DNA, 9 bp, Homo sapiens
  chr16:89558602-89558611
  hypo
cgggctcca

SEQ ID NO: 474719 - DNA, 214 bp, Homo sapiens
  chr16:89713336-89713550
  hypo
  pancreas_gallbladder vs. upper_gi,colorectal
cgcgggtggacatctttccacacctctgcatgcttgtctgccatccgagcctccccacaaggagccaggtgcctgcaggaggcccccgccgccctgcccaccctacctgtcagggtcctggcagggacccagcacagaggatgcttggtgacgtcagggagcaaccacaggtatgcagagacagcacgtcagcctgtgagccacccctcccgat

SEQ ID NO: 474720 - DNA, 10 bp, Homo sapiens
  chr16:89713636-89713646
  hypo
  pancreas_gallbladder vs. upper_gi,colorectal
cctgctgctc

SEQ ID NO: 474721 - DNA, 25 bp, Homo sapiens
  chr16:89899939-89899964
  hypo
  pancreas_gallbladder vs. melanoma,lymphoid_neoplasm, renal,sarcoma,uterine,prostate
cgccctgctgggctcaggggcaggt

SEQ ID NO: 474722 - DNA, 489 bp, Homo sapiens; identical to SEQ ID NO: 454870
  chr16:89900815-89901304
  hypo
  pancreas_gallbladder vs. melanoma,lymphoid_neoplasm, sarcoma,prostate,renal

SEQ ID NO: 474723 - DNA, 93 bp, Homo sapiens; identical to SEQ ID NO: 342862
  chr17:7188345-7188438
  hypo

SEQ ID NO: 474724 - DNA, 209 bp, Homo sapiens; identical to SEQ ID NO: 342899
  chr17:16923475-16923684
  hypo
  pancreas_gallbladder vs. upper_gi

SEQ ID NO: 474725 - DNA, 310 bp, Homo sapiens; identical to SEQ ID NO: 454882
  chr17:25620264-25620574
  hypo
  pancreas_gallbladder vs. renal

SEQ ID NO: 474726 - DNA, 62 bp, Homo sapiens; identical to SEQ ID NO: 348797
  chr17:25931759-25931821
  hypo
  pancreas_gallbladder vs. cervical,head_and_neck, anorectal,liver_bileduct,colorectal,lymphoid_neoplasm,uterine, breast,lung

SEQ ID NO: 474727 - DNA, 27 bp, Homo sapiens
  chr17:40427488-40427515
  hypo
  pancreas_gallbladder vs. upper_gi
gtgagttctttcctctttgttcacccc

SEQ ID NO: 474728 - DNA, 122 bp, Homo sapiens; identical to SEQ ID NO: 462557
  chr17:42906461-42906583
  hypo
  pancreas_gallbladder vs. head_and_neck

SEQ ID NO: 474729 - DNA, 182 bp, Homo sapiens; identical to SEQ ID NO: 455779
  chr17:46659093-46659275
  hypo
  pancreas_gallbladder vs. bladder_and_urothelial,cervical

SEQ ID NO: 474730 - DNA, 46 bp, Homo sapiens; identical to SEQ ID NO: 455780
  chr17:46659384-46659430
  hypo
  pancreas_gallbladder vs. bladder_and_urothelial,cervical

SEQ ID NO: 474731 - DNA, 64 bp, Homo sapiens; identical to SEQ ID NO: 460782
  chr17:46687527-46687591
  hypo
  pancreas_gallbladder vs. upper_gi,colorectal

SEQ ID NO: 474732 - DNA, 349 bp, Homo sapiens; identical to SEQ ID NO: 473871
  chr17:47073560-47073909
  hypo
  pancreas_gallbladder vs. anorectal,colorectal

SEQ ID NO: 474733 - DNA, 153 bp, Homo sapiens; identical to SEQ ID NO: 473872
  chr17:47074409-47074562
  hypo
  pancreas_gallbladder vs. colorectal

SEQ ID NO: 474734 - DNA, 197 bp, Homo sapiens; identical to SEQ ID NO: 343024
  chr17:48776811-48777008
  hypo
  pancreas_gallbladder vs. breast

SEQ ID NO: 474735 - DNA, 25 bp, Homo sapiens
  chr17:49229457-49229482
  hypo
  pancreas_gallbladder vs. renal,lymphoid_neoplasm, melanoma,liver_bileduct,multiple_myeloma,prostate
cgcgggaagctgagtcacgagaatc

SEQ ID NO: 474736 - DNA, 216 bp, Homo sapiens; identical to SEQ ID NO: 457619
  chr17:56327007-56327223
  hypo
  pancreas_gallbladder vs. bladder_and_urothelial,lung, anorectal,prostate

SEQ ID NO: 474737 - DNA, 48 bp, Homo sapiens; identical to SEQ ID NO: 348820
  chr17:57297129-57297177
  hypo
  pancreas_gallbladder vs. lymphoid_neoplasm

SEQ ID NO: 474738 - DNA, 112 bp, Homo sapiens; identical to SEQ ID NO: 454237
  chr17:61777761-61777873
  hypo
  pancreas_gallbladder vs. cervical,anorectal, lymphoid_neoplasm,multiple_myeloma,non_cancer,sarcoma

SEQ ID NO: 474739 - DNA, 76 bp, Homo sapiens; identical to SEQ ID NO: 345537
  chr17:61778423-61778499
  hypo
  pancreas_gallbladder vs. cervical,anorectal, lymphoid_neoplasm,multiple_myeloma,non_cancer,sarcoma

SEQ ID NO: 474740 - DNA, 243 bp, Homo sapiens; identical to SEQ ID NO: 343059
  chr17:62783342-62783585
  hypo
  pancreas_gallbladder vs. lymphoid_neoplasm

SEQ ID NO: 474741 - DNA, 335 bp, Homo sapiens; identical to SEQ ID NO: 367322
  chr17:70713689-70714024
  hypo
  pancreas_gallbladder vs. upper_gi

SEQ ID NO: 474742 - DNA, 81 bp, Homo sapiens; identical to SEQ ID NO: 454240
  chr17:73584287-73584368
  hypo
  pancreas_gallbladder vs. cervical

SEQ ID NO: 474743 - DNA, 170 bp, Homo sapiens; identical to SEQ ID NO: 352021
  chr17:73584951-73585121
  hypo
  pancreas_gallbladder vs. cervical

SEQ ID NO: 474744 - DNA, 5 bp, Homo sapiens
  chr17:73585938-73585943
  hypo
  pancreas_gallbladder vs. liver_bileduct
cgcgg

SEQ ID NO: 474745 - DNA, 271 bp, Homo sapiens; identical to SEQ ID NO: 460167
  chr17:73607997-73608268
  hypo

SEQ ID NO: 474746 - DNA, 212 bp, Homo sapiens; identical to SEQ ID NO: 460170
  chr17:73613151-73613363
  hypo

SEQ ID NO: 474747 - DNA, 527 bp, Homo sapiens; identical to SEQ ID NO: 367350
  chr17:73613424-73613951
  hypo

SEQ ID NO: 474748 - DNA, 2 bp, Homo sapiens
  chr17:73635994-73635996
  hypo
cg

SEQ ID NO: 474749 - DNA, 104 bp, Homo sapiens; identical to SEQ ID NO: 335678
  chr17:74072105-74072209
  hypo
  pancreas_gallbladder vs. upper_gi

SEQ ID NO: 474750 - DNA, 150 bp, Homo sapiens
  chr17:74391567-74391717
  hypo
  pancreas_gallbladder vs. liver_bileduct
cggccgagaaagtaattttttaaaggagggaggaaagaaagaaccatctggcctggacacacggctgagtcagccctcacctgactgagcctgtgaccgcccctgtaaaaggtgggtgggtgagtgtcctcgcaggtgccagtcagcccc

SEQ ID NO: 474751 - DNA, 346 bp, Homo sapiens; identical to SEQ ID NO: 343131
  chr17:74392164-74392510
  hypo

SEQ ID NO: 474752 - DNA, 512 bp, Homo sapiens; identical to SEQ ID NO: 460173
  chr17:76991011-76991523
  hypo
  pancreas_gallbladder vs. liver_bileduct

SEQ ID NO: 474753 - DNA, 632 bp, Homo sapiens; identical to SEQ ID NO: 460174
  chr17:76992727-76993359
  hypo
  pancreas_gallbladder vs. liver_bileduct

SEQ ID NO: 474754 - DNA, 142 bp, Homo sapiens; identical to SEQ ID NO: 348846
  chr17:76993419-76993561
  hypo
  pancreas_gallbladder vs. liver_bileduct

SEQ ID NO: 474755 - DNA, 277 bp, Homo sapiens
  chr17:76993082-76993359
  hypo
  pancreas_gallbladder vs. liver_bileduct
cggtgccgtcgccgtcggacagaatcacccagggcacggctttgctgccttcgatctggtagacgacccccgtccggtcatccacggagtagagtttcccattgaaaacaatcaggtcggatagctccatgcctctccccttctccgccaggtgggactccaggaccccatggtctttgtcccattccacggccaccttgtccccactgtctgacagggtcaggtagccctttttcaggtaactgaaccaggtgttttcctcttgggcccttgactc

SEQ ID NO: 474756 - DNA, 478 bp, Homo sapiens; identical to SEQ ID NO: 218133
  chr17:76993419-76993897
  hypo
  pancreas_gallbladder vs. liver_bileduct

SEQ ID NO: 474757 - DNA, 261 bp, Homo sapiens; identical to SEQ ID NO: 343164
  chr17:76998502-76998763
  hypo
  pancreas_gallbladder vs. liver_bileduct

SEQ ID NO: 474758 - DNA, 557 bp, Homo sapiens
  chr17:77918873-77919430
  hypo
  pancreas_gallbladder vs. colorectal
cgcgcaggtacagctgggggtgaggccgtcacgcgttagttagctccggtcccatgcggcctgctgcccaggaagcccactcccactggggcccttccctgggccaccccagcctggaaaagcacacccaggggcctctacctgctgcatgtgcctgcccccccaacgctccattccgccgctggaatcggctcacacctgcctctgccagttcctcccagatctgactgttccggaggctgtggtgtggtccagggtgaggcagagtgttgtgcccgggcgtggcaggacgctggcagccgctccatggccaggaaggctccccaccctcagtgcacacttgggggctgtttcccacgtccactcctcctggtgaggtgagtggatcatccagggagcccccccacccctcttcggctacgctcacccagatctatcatcttccagagctgttttagggcaggaaggggacgtatctgagccccaggatgctcgattcctgccattaaggtcatctcccaatgatgtgggacaagatcggggctatttctggcagc

SEQ ID NO: 474759 - DNA, 207 bp, Homo sapiens; identical to SEQ ID NO: 367414
  chr17:77919477-77919684
  hypo
  pancreas_gallbladder vs. colorectal

SEQ ID NO: 474760 - DNA, 152 bp, Homo sapiens; identical to SEQ ID NO: 471808
  chr17:77923970-77924122
  hypo
  pancreas_gallbladder vs. liver_bileduct,lung

SEQ ID NO: 474761 - DNA, 140 bp, Homo sapiens; identical to SEQ ID NO: 343190
  chr17:77976585-77976725
  hypo
  pancreas_gallbladder vs. head_and_neck

SEQ ID NO: 474762 - DNA, 353 bp, Homo sapiens
  chr17:78041114-78041467
  hypo
  pancreas_gallbladder vs. lung
cggcccgcagtcactagaaccccctcccaagacaagcaaaggcacctggttttctgggatcccctgcctaacttgtgtgcaattgcaagaaagcatatgcgttcacccggagtcttccttccctctcttgctccgtgggagcacaccacactcactgttctgcacctctttgctttttccatttaacagcgtgtccctagagcgcttcccaagtcaaaatataaacaccgctcgttcccgcctttctaccacatggcattccgctgggatacttctacggggaagcttcctgcccggggcatcgagggcgttcgcgtccgtctgttatggcggtgctgctgtagataaccgga

SEQ ID NO: 474763 - DNA, 200 bp, Homo sapiens; identical to SEQ ID NO: 367420
  chr17:78041496-78041696
  hypo
  pancreas_gallbladder vs. lung

SEQ ID NO: 474764 - DNA, 117 bp, Homo sapiens; identical to SEQ ID NO: 456644
  chr17:78143796-78143913
  hypo
  pancreas_gallbladder vs. lymphoid_neoplasm

SEQ ID NO: 474765 - DNA, 472 bp, Homo sapiens; identical to SEQ ID NO: 343213
  chr17:79046033-79046505
  hypo
  pancreas_gallbladder vs. liver_bileduct

SEQ ID NO: 474766 - DNA, 196 bp, Homo sapiens; identical to SEQ ID NO: 343217
  chr17:79060680-79060876
  hypo
  pancreas_gallbladder vs. liver_bileduct,upper_gi

SEQ ID NO: 474767 - DNA, 516 bp, Homo sapiens; identical to SEQ ID NO: 355756
  chr17:79166571-79167087
  hypo
  pancreas_gallbladder vs. liver_bileduct

SEQ ID NO: 474768 - DNA, 309 bp, Homo sapiens; identical to SEQ ID NO: 367454
  chr17:79870549-79870858
  hypo
  pancreas_gallbladder vs. lymphoid_neoplasm,breast, melanoma,liver_bileduct

SEQ ID NO: 474769 - DNA, 70 bp, Homo sapiens; identical to SEQ ID NO: 454923
  chr17:80832134-80832204
  hypo
  pancreas_gallbladder vs. liver_bileduct

SEQ ID NO: 474770 - DNA, 86 bp, Homo sapiens; identical to SEQ ID NO: 367494
  chr17:80832796-80832882
  hypo
  pancreas_gallbladder vs. liver_bileduct

SEQ ID NO: 474771 - DNA, 99 bp, Homo sapiens; identical to SEQ ID NO: 343280
  chr17:80867234-80867333
  hypo
  pancreas_gallbladder vs. liver_bileduct

SEQ ID NO: 474772 - DNA, 308 bp, Homo sapiens; identical to SEQ ID NO: 343281
  chr17:80879354-80879662
  hypo
  pancreas_gallbladder vs. melanoma,breast,lung

SEQ ID NO: 474773 - DNA, 79 bp, Homo sapiens; identical to SEQ ID NO: 463459
  chr17:81050575-81050654
  hypo

SEQ ID NO: 474774 - DNA, 206 bp, Homo sapiens; identical to SEQ ID NO: 463460
  chr17:81050716-81050922
  hypo

SEQ ID NO: 474775 - DNA, 238 bp, Homo sapiens; identical to SEQ ID NO: 345538
  chr18:2848166-2848404
  hypo
  pancreas_gallbladder vs. uterine,prostate

SEQ ID NO: 474776 - DNA, 206 bp, Homo sapiens
  chr18:3214837-3215043
  hypo
  pancreas_gallbladder vs. lung,breast, bladder_and_urothelial,colorectal,head_and_neck,melanoma, lymphoid_neoplasm,cervical,liver_bileduct,renal,anorectal, upper_gi,prostate,uterine,sarcoma,myeloid_neoplasm,ovary,
  CONT. FROM ABOVE: non_cancer,thyroid
cgaaccgaaacaaagcgagaagtaactgggagggttactcagagcacacgcctcttcctgaggttggaaggttggaggagggcgtccgacatacccatgggaggagccataatcgtaggctgaggctgccttccgactgacttcagagctcagggcgtgctgcgaggcctgctgctgggaggaggaggcggacgcccgacggaagg

SEQ ID NO: 474777 - DNA, 137 bp, Homo sapiens; identical to SEQ ID NO: 346177
  chr18:3215256-3215393
  hypo
  pancreas_gallbladder vs. lung,breast, bladder_and_urothelial,colorectal,head_and_neck,melanoma, lymphoid_neoplasm,cervical,liver_bileduct,renal,anorectal, upper_gi,prostate,uterine,sarcoma,myeloid_neoplasm,ovary,
  CONT. FROM ABOVE: non_cancer,thyroid

SEQ ID NO: 474778 - DNA, 255 bp, Homo sapiens; identical to SEQ ID NO: 473884
  chr18:4454777-4455032
  hypo
  pancreas_gallbladder vs. liver_bileduct

SEQ ID NO: 474779 - DNA, 273 bp, Homo sapiens; identical to SEQ ID NO: 459494
  chr18:7567478-7567751
  hypo
  pancreas_gallbladder vs. liver_bileduct

SEQ ID NO: 474780 - DNA, 154 bp, Homo sapiens; identical to SEQ ID NO: 456656
  chr18:8612051-8612205
  hypo
  pancreas_gallbladder vs. liver_bileduct

SEQ ID NO: 474781 - DNA, 81 bp, Homo sapiens; identical to SEQ ID NO: 343325
  chr18:9514129-9514210
  hypo
  pancreas_gallbladder vs. lymphoid_neoplasm,colorectal

SEQ ID NO: 474782 - DNA, 14 bp, Homo sapiens
  chr18:44337138-44337152
  hypo
  pancreas_gallbladder vs. myeloid_neoplasm,thyroid, non_cancer,sarcoma,renal,prostate,breast,bladder_and_urothelial, ovary
caggggctgggcgc

SEQ ID NO: 474783 - DNA, 52 bp, Homo sapiens; identical to SEQ ID NO: 456664
  chr18:46142611-46142663
  hypo
  pancreas_gallbladder vs. liver_bileduct

SEQ ID NO: 474784 - DNA, 53 bp, Homo sapiens; identical to SEQ ID NO: 352104
  chr18:53257322-53257375
  hypo
  pancreas_gallbladder vs. cervical

SEQ ID NO: 474785 - DNA, 57 bp, Homo sapiens
  chr19:617561-617618
  hypo
  pancreas_gallbladder vs. liver_bileduct
cgccttactcagagcagaaccgcttgaccaggaatctggacaggtcctgcaggatgg

SEQ ID NO: 474786 - DNA, 808 bp, Homo sapiens; identical to SEQ ID NO: 355916
  chr19:617647-618455
  hypo
  pancreas_gallbladder vs. liver_bileduct

SEQ ID NO: 474787 - DNA, 159 bp, Homo sapiens; identical to SEQ ID NO: 453776
  chr19:883424-883583
  hypo
  pancreas_gallbladder vs. melanoma,sarcoma

SEQ ID NO: 474788 - DNA, 45 bp, Homo sapiens; identical to SEQ ID NO: 453777
  chr19:884311-884356
  hypo
  pancreas_gallbladder vs. melanoma,sarcoma

SEQ ID NO: 474789 - DNA, 544 bp, Homo sapiens; identical to SEQ ID NO: 346191
  chr19:884311-884855
  hypo
  pancreas_gallbladder vs. melanoma,lymphoid_neoplasm

SEQ ID NO: 474790 - DNA, 8 bp, Homo sapiens
  chr19:939405-939413
  hypo
  pancreas_gallbladder vs. liver_bileduct
cgcgcccg

SEQ ID NO: 474791 - DNA, 241 bp, Homo sapiens; identical to SEQ ID NO: 367728
  chr19:939434-939675
  hypo
  pancreas_gallbladder vs. liver_bileduct

SEQ ID NO: 474792 - DNA, 10 bp, Homo sapiens
  chr19:1030023-1030033
  hypo
  pancreas_gallbladder vs. liver_bileduct
cgtttatctc

SEQ ID NO: 474793 - DNA, 128 bp, Homo sapiens; identical to SEQ ID NO: 367734
  chr19:1030225-1030353
  hypo
  pancreas_gallbladder vs. liver_bileduct

SEQ ID NO: 474794 - DNA, 198 bp, Homo sapiens; identical to SEQ ID NO: 453779
  chr19:1226490-1226688
  hypo
  pancreas_gallbladder vs. liver_bileduct

SEQ ID NO: 474795 - DNA, 317 bp, Homo sapiens; identical to SEQ ID NO: 355935
  chr19:1226828-1227145
  hypo
  pancreas_gallbladder vs. liver_bileduct

SEQ ID NO: 474796 - DNA, 790 bp, Homo sapiens; identical to SEQ ID NO: 343560
  chr19:1254919-1255709
  hypo
  pancreas_gallbladder vs. upper_gi

SEQ ID NO: 474797 - DNA, 121 bp, Homo sapiens; identical to SEQ ID NO: 459501
  chr19:1449921-1450042
  hypo
  pancreas_gallbladder vs. uterine

SEQ ID NO: 474798 - DNA, 243 bp, Homo sapiens; identical to SEQ ID NO: 453781
  chr19:1911845-1912088
  hypo
  pancreas_gallbladder vs. liver_bileduct,renal, bladder_and_urothelial,lymphoid_neoplasm,melanoma,lung,sarcoma, breast

SEQ ID NO: 474799 - DNA, 161 bp, Homo sapiens; identical to SEQ ID NO: 348918
  chr19:1912446-1912607
  hypo
  pancreas_gallbladder vs. liver_bileduct,renal, bladder_and_urothelial,lymphoid_neoplasm,melanoma,lung,sarcoma, breast

SEQ ID NO: 474800 - DNA, 659 bp, Homo sapiens; identical to SEQ ID NO: 355950
  chr19:1912446-1913105
  hypo
  pancreas_gallbladder vs. liver_bileduct,melanoma, lymphoid_neoplasm

SEQ ID NO: 474801 - DNA, 262 bp, Homo sapiens; identical to SEQ ID NO: 460192
  chr19:1969650-1969912
  hypo
  pancreas_gallbladder vs. liver_bileduct

SEQ ID NO: 474802 - DNA, 320 bp, Homo sapiens; identical to SEQ ID NO: 460193
  chr19:1970106-1970426
  hypo
  pancreas_gallbladder vs. liver_bileduct

SEQ ID NO: 474803 - DNA, 320 bp, Homo sapiens; identical to SEQ ID NO: 460193
  chr19:1970106-1970426
  hypo
  pancreas_gallbladder vs. liver_bileduct

SEQ ID NO: 474804 - DNA, 47 bp, Homo sapiens; identical to SEQ ID NO: 459506
  chr19:3785511-3785558
  hypo
  pancreas_gallbladder vs. myeloid_neoplasm,thyroid, prostate,ovary

SEQ ID NO: 474805 - DNA, 100 bp, Homo sapiens; identical to SEQ ID NO: 460199
  chr19:3966587-3966687
  hypo
  pancreas_gallbladder vs. head_and_neck,melanoma

SEQ ID NO: 474806 - DNA, 183 bp, Homo sapiens; identical to SEQ ID NO: 367812
  chr19:3966755-3966938
  hypo
  pancreas_gallbladder vs. head_and_neck,melanoma

SEQ ID NO: 474807 - DNA, 30 bp, Homo sapiens; identical to SEQ ID NO: 473915
  chr19:4053805-4053835
  hypo
  pancreas_gallbladder vs. lung

SEQ ID NO: 474808 - DNA, 266 bp, Homo sapiens; identical to SEQ ID NO: 473916
  chr19:4054040-4054306
  hypo
  pancreas_gallbladder vs. lung

SEQ ID NO: 474809 - DNA, 56 bp, Homo sapiens; identical to SEQ ID NO: 473917
  chr19:4054380-4054436
  hypo
  pancreas_gallbladder vs. lung

SEQ ID NO: 474810 - DNA, 150 bp, Homo sapiens; identical to SEQ ID NO: 473918
  chr19:4054471-4054621
  hypo
  pancreas_gallbladder vs. lung

SEQ ID NO: 474811 - DNA, 183 bp, Homo sapiens; identical to SEQ ID NO: 473919
  chr19:4054123-4054306
  hypo
  pancreas_gallbladder vs. bladder_and_urothelial, liver_bileduct,lung,cervical,lymphoid_neoplasm,renal,anorectal, melanoma

SEQ ID NO: 474812 - DNA, 56 bp, Homo sapiens; identical to SEQ ID NO: 473917
  chr19:4054380-4054436
  hypo
  pancreas_gallbladder vs. bladder_and_urothelial, liver_bileduct,lung,cervical,lymphoid_neoplasm,renal,anorectal, melanoma

SEQ ID NO: 474813 - DNA, 171 bp, Homo sapiens; identical to SEQ ID NO: 473921
  chr19:4054471-4054642
  hypo
  pancreas_gallbladder vs. bladder_and_urothelial, liver_bileduct,lung,cervical,lymphoid_neoplasm,renal,anorectal, melanoma

SEQ ID NO: 474814 - DNA, 186 bp, Homo sapiens; identical to SEQ ID NO: 473922
  chr19:4054917-4055103
  hypo
  pancreas_gallbladder vs. bladder_and_urothelial, liver_bileduct,lung,cervical,lymphoid_neoplasm,renal,anorectal, melanoma

SEQ ID NO: 474815 - DNA, 16 bp, Homo sapiens
  chr19:4054626-4054642
  hypo
  pancreas_gallbladder vs. bladder_and_urothelial, liver_bileduct,lung,melanoma
cggcctccttggtggc

SEQ ID NO: 474816 - DNA, 520 bp, Homo sapiens; identical to SEQ ID NO: 352163
  chr19:4054917-4055437
  hypo
  pancreas_gallbladder vs. bladder_and_urothelial, liver_bileduct,lung,melanoma

SEQ ID NO: 474817 - DNA, 356 bp, Homo sapiens
  chr19:4096061-4096417
  hypo
  pancreas_gallbladder vs. liver_bileduct
cgtgcccggccaaactgggtccacagttttaagcccaagcactggggagcctggcctgacacacgtccccggagcgggagtggccgtgtaagcggtgccagcagggcaggggcaggcctttcccgcgcaggggcaggggcgggaagaggcgggggagaggtcgggggatgtgctcactgggcatgggtgtggctgctaggtgcagggagagctgggtcaccagggccaccccacctggctccgtcatcatctcgccacccaaccccaggcctagcccagtctgcaggcagctcaaatgcccgtttctctgccccagctccaaagggccaccaaagacacagaaacccacagaaggc

SEQ ID NO: 474818 - DNA, 165 bp, Homo sapiens; identical to SEQ ID NO: 355975
  chr19:4096525-4096690
  hypo
  pancreas_gallbladder vs. liver_bileduct

SEQ ID NO: 474819 - DNA, 33 bp, Homo sapiens; identical to SEQ ID NO: 361387
  chr19:4304684-4304717
  hypo
  pancreas_gallbladder vs. bladder_and_urothelial

SEQ ID NO: 474820 - DNA, 8 bp, Homo sapiens
  chr19:4361167-4361175
  hypo
  pancreas_gallbladder vs. lymphoid_neoplasm,breast, colorectal
cgatccca

SEQ ID NO: 474821 - DNA, 290 bp, Homo sapiens
  chr19:4361250-4361540
  hypo
  pancreas_gallbladder vs. lymphoid_neoplasm,breast, colorectal
ccccagaggaacattagtgtttctaagagcaccttagtgttgccccgcctcggccagctgggcgagaagttggggagcgggggaggaggctggcgccatggagtggggaagggagccgtcaccgttgggagtcagcgctagtgtaaacaggcatccccacccacccagataagcccccccacccaagtgtggggtcctgctcagggagtacctcaagggccggggcccaggtggcgccggcaggctcagacaccgccctggcagcaggggctccgtggaatgcaggagac

SEQ ID NO: 474822 - DNA, 179 bp, Homo sapiens; identical to SEQ ID NO: 367824
  chr19:4361700-4361879
  hypo
  pancreas_gallbladder vs. lymphoid_neoplasm,breast, colorectal

SEQ ID NO: 474823 - DNA, 233 bp, Homo sapiens; identical to SEQ ID NO: 367832
  chr19:4714229-4714462
  hypo
  pancreas_gallbladder vs. upper_gi,liver_bileduct

SEQ ID NO: 474824 - DNA, 323 bp, Homo sapiens; identical to SEQ ID NO: 361399
  chr19:6590881-6591204
  hypo
  pancreas_gallbladder vs. lymphoid_neoplasm,renal

SEQ ID NO: 474825 - DNA, 73 bp, Homo sapiens; identical to SEQ ID NO: 462602
  chr19:8115163-8115236
  hypo
  pancreas_gallbladder vs. ovary

SEQ ID NO: 474826 - DNA, 685 bp, Homo sapiens; identical to SEQ ID NO: 335930
  chr19:8274278-8274963
  hypo
  pancreas_gallbladder vs. lung,cervical

SEQ ID NO: 474827 - DNA, 107 bp, Homo sapiens; identical to SEQ ID NO: 454983
  chr19:9129007-9129114
  hypo
  pancreas_gallbladder vs. lymphoid_neoplasm

SEQ ID NO: 474828 - DNA, 92 bp, Homo sapiens; identical to SEQ ID NO: 356010
  chr19:9129229-9129321
  hypo
  pancreas_gallbladder vs. lymphoid_neoplasm

SEQ ID NO: 474829 - DNA, 61 bp, Homo sapiens; identical to SEQ ID NO: 461750
  chr19:10370250-10370311
  hypo
  pancreas_gallbladder vs. melanoma,colorectal

SEQ ID NO: 474830 - DNA, 88 bp, Homo sapiens; identical to SEQ ID NO: 348939
  chr19:10370575-10370663
  hypo
  pancreas_gallbladder vs. melanoma,colorectal

SEQ ID NO: 474831 - DNA, 215 bp, Homo sapiens; identical to SEQ ID NO: 459511
  chr19:10400761-10400976
  hypo
  pancreas_gallbladder vs. lung,head_and_neck

SEQ ID NO: 474832 - DNA, 215 bp, Homo sapiens; identical to SEQ ID NO: 459511
  chr19:10400761-10400976
  hypo
  pancreas_gallbladder vs. lung

SEQ ID NO: 474833 - DNA, 485 bp, Homo sapiens; identical to SEQ ID NO: 462606
  chr19:10529649-10530134
  hypo
  pancreas_gallbladder vs. bladder_and_urothelial

SEQ ID NO: 474834 - DNA, 111 bp, Homo sapiens; identical to SEQ ID NO: 352184
  chr19:10530526-10530637
  hypo
  pancreas_gallbladder vs. bladder_and_urothelial

SEQ ID NO: 474835 - DNA, 631 bp, Homo sapiens; identical to SEQ ID NO: 457670
  chr19:10530654-10531285
  hypo
  pancreas_gallbladder vs. breast,sarcoma,uterine,prostate, head_and_neck

SEQ ID NO: 474836 - DNA, 139 bp, Homo sapiens; identical to SEQ ID NO: 457671
  chr19:10531146-10531285
  hypo
  pancreas_gallbladder vs. breast,uterine,sarcoma,prostate, head_and_neck

SEQ ID NO: 474837 - DNA, 348 bp, Homo sapiens; identical to SEQ ID NO: 465372
  chr19:11128636-11128984
  hypo
  pancreas_gallbladder vs. lymphoid_neoplasm,cervical, melanoma,liver_bileduct,renal

SEQ ID NO: 474838 - DNA, 267 bp, Homo sapiens
  chr19:11129453-11129720
  hypo
  pancreas_gallbladder vs. liver_bileduct
cgtcctcgccagtctctcttcctccctccctccctcagctgccctaaacacagtttctctgcccactcggagggctgtggccatgttggcctcgcccctgacagccagtggctatgggtttgcacagtgagccattgatgagagaccggcacttgactctcatttccttgttccatcagaacgctgtccaactgggcgtacgagtttgacaagtgggccccctccgtggtgaaggtgtcttacaaggtaggtcacagccactgaggt

SEQ ID NO: 474839 - DNA, 31 bp, Homo sapiens; identical to SEQ ID NO: 356030
  chr19:11129826-11129857
  hypo
  pancreas_gallbladder vs. liver_bileduct

SEQ ID NO: 474840 - DNA, 143 bp, Homo sapiens; identical to SEQ ID NO: 343755
  chr19:11152817-11152960
  hypo
  pancreas_gallbladder vs. upper_gi

SEQ ID NO: 474841 - DNA, 68 bp, Homo sapiens; identical to SEQ ID NO: 462612
  chr19:11592604-11592672
  hypo
  pancreas_gallbladder vs. ovary

SEQ ID NO: 474842 - DNA, 189 bp, Homo sapiens; identical to SEQ ID NO: 347537
  chr19:11593453-11593642
  hypo
  pancreas_gallbladder vs. anorectal,melanoma

SEQ ID NO: 474843 - DNA, 221 bp, Homo sapiens; identical to SEQ ID NO: 454280
  chr19:12995851-12996072
  hypo
  pancreas_gallbladder vs. upper_gi

SEQ ID NO: 474844 - DNA, 102 bp, Homo sapiens; identical to SEQ ID NO: 205249
  chr19:16187000-16187102
  hypo
  pancreas_gallbladder vs. lung,upper_gi,liver_bileduct

SEQ ID NO: 474845 - DNA, 517 bp, Homo sapiens; identical to SEQ ID NO: 454284
  chr19:16187104-16187621
  hypo
  pancreas_gallbladder vs. lung,upper_gi,liver_bileduct

SEQ ID NO: 474846 - DNA, 148 bp, Homo sapiens; identical to SEQ ID NO: 454285
  chr19:16187640-16187788
  hypo
  pancreas_gallbladder vs. lung,upper_gi,liver_bileduct

SEQ ID NO: 474847 - DNA, 329 bp, Homo sapiens; identical to SEQ ID NO: 454286
  chr19:16187292-16187621
  hypo
  pancreas_gallbladder vs. lung,upper_gi,liver_bileduct

SEQ ID NO: 474848 - DNA, 634 bp, Homo sapiens; identical to SEQ ID NO: 345579
  chr19:16187640-16188274
  hypo
  pancreas_gallbladder vs. lung,upper_gi,liver_bileduct

SEQ ID NO: 474849 - DNA, 106 bp, Homo sapiens; identical to SEQ ID NO: 459516
  chr19:17392397-17392503
  hypo
  pancreas_gallbladder vs. bladder_and_urothelial, anorectal

SEQ ID NO: 474850 - DNA, 240 bp, Homo sapiens; identical to SEQ ID NO: 462619
  chr19:17716539-17716779
  hypo
  pancreas_gallbladder vs. uterine,upper_gi

SEQ ID NO: 474851 - DNA, 6 bp, Homo sapiens
  chr19:17717524-17717530
  hypo
  pancreas_gallbladder vs. uterine
ccgcac

SEQ ID NO: 474852 - DNA, 61 bp, Homo sapiens; identical to SEQ ID NO: 455841
  chr19:30718934-30718995
  hypo
  pancreas_gallbladder vs. melanoma,prostate

SEQ ID NO: 474853 - DNA, 58 bp, Homo sapiens; identical to SEQ ID NO: 356122
  chr19:36222534-36222592
  hypo
  pancreas_gallbladder vs. liver_bileduct

SEQ ID NO: 474854 - DNA, 87 bp, Homo sapiens; identical to SEQ ID NO: 343956
  chr19:39210557-39210644
  hypo
  pancreas_gallbladder vs. lymphoid_neoplasm, liver_bileduct,upper_gi,colorectal

SEQ ID NO: 474855 - DNA, 91 bp, Homo sapiens
  chr19:39221989-39222080
  hypo
  pancreas_gallbladder vs. melanoma,bladder_and_urothelial
cggcagggtgagtacaggctgatcccttcaatcctctgggcctgtttcctcatccatcaaacggactaagacagccccgaccccatagggt

SEQ ID NO: 474856 - DNA, 138 bp, Homo sapiens; identical to SEQ ID NO: 368103
  chr19:39222121-39222259
  hypo
  pancreas_gallbladder vs. melanoma,bladder_and_urothelial

SEQ ID NO: 474857 - DNA, 57 bp, Homo sapiens; identical to SEQ ID NO: 453811
  chr19:39329516-39329573
  hypo
  pancreas_gallbladder vs. lymphoid_neoplasm

SEQ ID NO: 474858 - DNA, 68 bp, Homo sapiens; identical to SEQ ID NO: 473968
  chr19:39997621-39997689
  hypo
  pancreas_gallbladder vs. head_and_neck,breast

SEQ ID NO: 474859 - DNA, 157 bp, Homo sapiens; identical to SEQ ID NO: 356149
  chr19:42408960-42409117
  hypo
  pancreas_gallbladder vs. cervical,melanoma, lymphoid_neoplasm

SEQ ID NO: 474860 - DNA, 319 bp, Homo sapiens; identical to SEQ ID NO: 368179
  chr19:48857831-48858150
  hypo
  pancreas_gallbladder vs. head_and_neck,cervical

SEQ ID NO: 474861 - DNA, 315 bp, Homo sapiens
  chr19:49179997-49180312
  hypo
  pancreas_gallbladder vs. liver_bileduct
cgacggcgagcgaggctgggaaatggggccttcccgtactgctggtggaaacggaaactggggcagccacctggcagctcccaaaacgattcaacgtagagttcaccctgtgacccagcacacaggttcgtggcagcactatttgcaacagccgaaaactggaaacaactccagtgcctatcacctgatgagtgaatacattgtggtctacctggacaatgggactttcagtcttgaaaggagtgaggcaattatctgggcgtggtggctgtacctgtagtcctacctgtagtcccagctactcgggaggctgac

SEQ ID NO: 474862 - DNA, 219 bp, Homo sapiens; identical to SEQ ID NO: 453035
  chr19:50553779-50553998
  hypo
  pancreas_gallbladder vs. bladder_and_urothelial, colorectal,uterine

SEQ ID NO: 474863 - DNA, 16 bp, Homo sapiens
  chr19:50833813-50833829
  hypo
  pancreas_gallbladder vs. melanoma,upper_gi
cgaggcgagaacttct

SEQ ID NO: 474864 - DNA, 446 bp, Homo sapiens; identical to SEQ ID NO: 352368
  chr19:50833970-50834416
  hypo
  pancreas_gallbladder vs. melanoma,upper_gi

SEQ ID NO: 474865 - DNA, 77 bp, Homo sapiens; identical to SEQ ID NO: 336229
  chr19:51111319-51111396
  hypo
  pancreas_gallbladder vs. sarcoma

SEQ ID NO: 474866 - DNA, 73 bp, Homo sapiens; identical to SEQ ID NO: 345605
  chr19:51228809-51228882
  hypo
  pancreas_gallbladder vs. melanoma,ovary,prostate,uterine, cervical,breast,thyroid,head_and_neck,lung,non_cancer, myeloid_neoplasm,bladder_and_urothelial,renal,colorectal, multiple_myeloma,anorectal

SEQ ID NO: 474867 - DNA, 412 bp, Homo sapiens; identical to SEQ ID NO: 460234
  chr19:56199006-56199418
  hypo
  pancreas_gallbladder vs. liver_bileduct

SEQ ID NO: 474868 - DNA, 133 bp, Homo sapiens; identical to SEQ ID NO: 356223
  chr19:56199619-56199752
  hypo
  pancreas_gallbladder vs. liver_bileduct

SEQ ID NO: 474869 - DNA, 153 bp, Homo sapiens; identical to SEQ ID NO: 473987
  chr19:56988132-56988285
  hypo
  pancreas_gallbladder vs. ovary,melanoma,prostate

SEQ ID NO: 474870 - DNA, 31 bp, Homo sapiens
  chr2:7164418-7164449
  hypo
  pancreas_gallbladder vs. bladder_and_urothelial,lung, cervical,head_and_neck,upper_gi,breast,melanoma,anorectal
cgatgcttccagcatagccagtgctcctggg

SEQ ID NO: 474871 - DNA, 255 bp, Homo sapiens; identical to SEQ ID NO: 455037
  chr2:8834468-8834723
  hypo
  pancreas_gallbladder vs. liver_bileduct,breast

SEQ ID NO: 474872 - DNA, 121 bp, Homo sapiens; identical to SEQ ID NO: 362803
  chr2:8834896-8835017
  hypo
  pancreas_gallbladder vs. liver_bileduct,breast

SEQ ID NO: 474873 - DNA, 147 bp, Homo sapiens; identical to SEQ ID NO: 465423
  chr2:8870193-8870340
  hypo
  pancreas_gallbladder vs. breast,melanoma,prostate, uterine,renal,lymphoid_neoplasm,ovary,sarcoma,non_cancer, head_and_neck

SEQ ID NO: 474874 - DNA, 63 bp, Homo sapiens; identical to SEQ ID NO: 455051
  chr2:10156251-10156314
  hypo
  pancreas_gallbladder vs. melanoma,liver_bileduct, lymphoid_neoplasm,renal,sarcoma,breast,prostate,non_cancer

SEQ ID NO: 474875 - DNA, 5 bp, Homo sapiens
  chr2:25391009-25391014
  hypo
  pancreas_gallbladder vs. myeloid_neoplasm,ovary,uterine, non_cancer,breast
cgaaa

SEQ ID NO: 474876 - DNA, 22 bp, Homo sapiens
  chr2:25391734-25391756
  hypo
  pancreas_gallbladder vs. myeloid_neoplasm,ovary,uterine, non_cancer,breast
gcacccccgtgtggggcaggcc

SEQ ID NO: 474877 - DNA, 38 bp, Homo sapiens; identical to SEQ ID NO: 454314
  chr2:30453530-30453568
  hypo
  pancreas_gallbladder vs. ovary,myeloid_neoplasm, non_cancer,uterine,thyroid

SEQ ID NO: 474878 - DNA, 9 bp, Homo sapiens
  chr2:40679688-40679697
  hypo
  pancreas_gallbladder vs. bladder_and_urothelial,ovary
cgcctaccc

SEQ ID NO: 474879 - DNA, 75 bp, Homo sapiens; identical to SEQ ID NO: 455074
  chr2:85819578-85819653
  hypo
  pancreas_gallbladder vs. melanoma

SEQ ID NO: 474880 - DNA, 77 bp, Homo sapiens; identical to SEQ ID NO: 456821
  chr2:97427378-97427455
  hypo

SEQ ID NO: 474881 - DNA, 144 bp, Homo sapiens; identical to SEQ ID NO: 345031
  chr2:105471069-105471213
  hypo
  pancreas_gallbladder vs. melanoma,renal,multiple_myeloma, non_cancer,uterine

SEQ ID NO: 474882 - DNA, 116 bp, Homo sapiens
  chr2:105719504-105719620
  hypo
  pancreas_gallbladder vs. colorectal,upper_gi
cgatagctgattggctgcaggagagctgggggcgggtattcggtatgagatccacaggctgctgggaatgcaaagagccaggaagacaggaagaaaagttgatgggaggaggagga

SEQ ID NO: 474883 - DNA, 264 bp, Homo sapiens; identical to SEQ ID NO: 362946
  chr2:105719654-105719918
  hypo
  pancreas_gallbladder vs. colorectal,upper_gi

SEQ ID NO: 474884 - DNA, 455 bp, Homo sapiens; identical to SEQ ID NO: 474007
  chr2:105760109-105760564
  hypo
  pancreas_gallbladder vs. uterine

SEQ ID NO: 474885 - DNA, 200 bp, Homo sapiens; identical to SEQ ID NO: 337706
  chr2:105987680-105987880
  hypo
  pancreas_gallbladder vs. colorectal

SEQ ID NO: 474886 - DNA, 213 bp, Homo sapiens; identical to SEQ ID NO: 362977
  chr2:121549381-121549594
  hypo
  pancreas_gallbladder vs. colorectal

SEQ ID NO: 474887 - DNA, 317 bp, Homo sapiens; identical to SEQ ID NO: 337749
  chr2:122187647-122187964
  hypo
  pancreas_gallbladder vs. lung,head_and_neck,melanoma, anorectal,bladder_and_urothelial

SEQ ID NO: 474888 - DNA, 382 bp, Homo sapiens; identical to SEQ ID NO: 459587
  chr2:127413347-127413729
  hypo
  pancreas_gallbladder vs. melanoma,lymphoid_neoplasm, liver_bileduct,sarcoma,renal

SEQ ID NO: 474889 - DNA, 53 bp, Homo sapiens; identical to SEQ ID NO: 459588
  chr2:127413676-127413729
  hypo
  pancreas_gallbladder vs. melanoma,liver_bileduct,sarcoma, lymphoid_neoplasm,renal

SEQ ID NO: 474890 - DNA, 255 bp, Homo sapiens; identical to SEQ ID NO: 349581
  chr2:127414108-127414363
  hypo
  pancreas_gallbladder vs. melanoma,liver_bileduct,sarcoma, lymphoid_neoplasm,renal

SEQ ID NO: 474891 - DNA, 6 bp, Homo sapiens
  chr2:127535179-127535185
  hypo
  pancreas_gallbladder vs. liver_bileduct,melanoma,breast, bladder_and_urothelial
aagggc

SEQ ID NO: 474892 - DNA, 94 bp, Homo sapiens; identical to SEQ ID NO: 457865
  chr2:136874839-136874933
  hypo
  pancreas_gallbladder vs. lymphoid_neoplasm

SEQ ID NO: 474893 - DNA, 427 bp, Homo sapiens; identical to SEQ ID NO: 457866
  chr2:136875399-136875826
  hypo
  pancreas_gallbladder vs. lymphoid_neoplasm

SEQ ID NO: 474894 - DNA, 61 bp, Homo sapiens; identical to SEQ ID NO: 466964
  chr2:137523039-137523100
  hypo
  pancreas_gallbladder vs. sarcoma,lung

SEQ ID NO: 474895 - DNA, 51 bp, Homo sapiens; identical to SEQ ID NO: 453124
  chr2:149632592-149632643
  hypo
  pancreas_gallbladder vs. ovary,sarcoma,prostate,breast, thyroid,bladder_and_urothelial,non_cancer,uterine,melanoma

SEQ ID NO: 474896 - DNA, 220 bp, Homo sapiens; identical to SEQ ID NO: 466996
  chr2:177052744-177052964
  hypo
  pancreas_gallbladder vs. lung,colorectal

SEQ ID NO: 474897 - DNA, 110 bp, Homo sapiens; identical to SEQ ID NO: 337838
  chr2:206896324-206896434
  hypo
  pancreas_gallbladder vs. liver_bileduct

SEQ ID NO: 474898 - DNA, 240 bp, Homo sapiens; identical to SEQ ID NO: 474043
  chr2:207308960-207309200
  hypo
  pancreas_gallbladder vs. head_and_neck,anorectal,uterine, sarcoma,melanoma,myeloid_neoplasm,bladder_and_urothelial, thyroid,prostate

SEQ ID NO: 474899 - DNA, 185 bp, Homo sapiens; identical to SEQ ID NO: 337846
  chr2:216274340-216274525
  hypo
  pancreas_gallbladder vs. upper_gi

SEQ ID NO: 474900 - DNA, 21 bp, Homo sapiens
  chr2:217559556-217559577
  hypo
  pancreas_gallbladder vs. anorectal
aaaggggccaagagggccccc

SEQ ID NO: 474901 - DNA, 237 bp, Homo sapiens; identical to SEQ ID NO: 459601
  chr2:225906168-225906405
  hypo
  pancreas_gallbladder vs. lymphoid_neoplasm,sarcoma, prostate,non_cancer,lung,breast,cervical,myeloid_neoplasm,ovary, thyroid

SEQ ID NO: 474902 - DNA, 77 bp, Homo sapiens; identical to SEQ ID NO: 454345
  chr2:225906328-225906405
  hypo
  pancreas_gallbladder vs. lymphoid_neoplasm,non_cancer, prostate,multiple_myeloma,breast,myeloid_neoplasm,lung,thyroid, cervical,sarcoma,renal,ovary,melanoma

SEQ ID NO: 474903 - DNA, 624 bp, Homo sapiens; identical to SEQ ID NO: 457903
  chr2:232790030-232790654
  hypo
  pancreas_gallbladder vs. head_and_neck

SEQ ID NO: 474904 - DNA, 20 bp, Homo sapiens
  chr2:232790784-232790804
  hypo
  pancreas_gallbladder vs. head_and_neck
tctcctgggtcctgcgcgcc

SEQ ID NO: 474905 - DNA, 342 bp, Homo sapiens; identical to SEQ ID NO: 453146
  chr2:232790312-232790654
  hypo
  pancreas_gallbladder vs. head_and_neck, bladder_and_urothelial

SEQ ID NO: 474906 - DNA, 264 bp, Homo sapiens; identical to SEQ ID NO: 453147
  chr2:232790784-232791048
  hypo
  pancreas_gallbladder vs. head_and_neck, bladder_and_urothelial

SEQ ID NO: 474907 - DNA, 627 bp, Homo sapiens
  chr2:234372729-234373356
  hypo
  pancreas_gallbladder vs. liver_bileduct,upper_gi
cggacctcacccccctgggcctcgcgctgatcagcagtgcacactctccatttctctctccctccctccgcctggagcagcagctggatccgcctcagaaggagcagctggggagtgctcttgccgagatggaccgacagctcaggaggctggcagacaccccgtggctctgccagtccgcagagcccggcgacgaagaggtatgtggctcatagggctgtgcctgggtctcccggacatggtggctctcgcctgaagtgcctgtgttccttgtgacccgtgtggctctgggatcaagatcgtgtcgctccggcagcccctgaggggccttctccagacttcgctattaaaatgctctttaaggcagggagggacagcaggtaggaaggagttctgggctgggattaagagtgccccttgaggaccagggacctgttgtcctctgaaacagaactgcagggcttcctggacagtgggtagaaggaaggctgagcccagccccacagcctcccccgagggtggagatgtatcatgggataaatggcagccttttgggatcccgctgtggacagggcgcagttggtgtgcgccactccccactcacactctcttcctgtgtgaacagaa

SEQ ID NO: 474908 - DNA, 339 bp, Homo sapiens; identical to SEQ ID NO: 353242
  chr2:234373385-234373724
  hypo
  pancreas_gallbladder vs. liver_bileduct,upper_gi

SEQ ID NO: 474909 - DNA, 52 bp, Homo sapiens; identical to SEQ ID NO: 376621
  chr2:239006881-239006933
  hypo
  pancreas_gallbladder vs. liver_bileduct

SEQ ID NO: 474910 - DNA, 5 bp, Homo sapiens
  chr2:239265697-239265702
  hypo
cgtga

SEQ ID NO: 474911 - DNA, 121 bp, Homo sapiens; identical to SEQ ID NO: 473157
  chr2:240167455-240167576
  hypo
  pancreas_gallbladder vs. melanoma

SEQ ID NO: 474912 - DNA, 310 bp, Homo sapiens; identical to SEQ ID NO: 353257
  chr2:240167605-240167915
  hypo
  pancreas_gallbladder vs. melanoma

SEQ ID NO: 474913 - DNA, 49 bp, Homo sapiens; identical to SEQ ID NO: 363148
  chr2:240169135-240169184
  hypo
  pancreas_gallbladder vs. lymphoid_neoplasm

SEQ ID NO: 474914 - DNA, 172 bp, Homo sapiens; identical to SEQ ID NO: 337972
  chr2:241373330-241373502
  hypo
  pancreas_gallbladder vs. colorectal

SEQ ID NO: 474915 - DNA, 360 bp, Homo sapiens; identical to SEQ ID NO: 347959
  chr2:241542357-241542717
  hypo
  pancreas_gallbladder vs. liver_bileduct, lymphoid_neoplasm,lung,melanoma,renal,breast,prostate, bladder_and_urothelial,sarcoma,uterine

SEQ ID NO: 474916 - DNA, 241 bp, Homo sapiens; identical to SEQ ID NO: 345785
  chr2:242436503-242436744
  hypo
  pancreas_gallbladder vs. liver_bileduct,cervical, melanoma,lymphoid_neoplasm,breast

SEQ ID NO: 474917 - DNA, 146 bp, Homo sapiens; identical to SEQ ID NO: 465469
  chr2:242523762-242523908
  hypo
  pancreas_gallbladder vs. lymphoid_neoplasm,prostate, anorectal,liver_bileduct,breast,cervical

SEQ ID NO: 474918 - DNA, 223 bp, Homo sapiens; identical to SEQ ID NO: 465470
  chr2:242524147-242524370
  hypo
  pancreas_gallbladder vs. lymphoid_neoplasm,prostate, anorectal,liver_bileduct,breast,cervical

SEQ ID NO: 474919 - DNA, 102 bp, Homo sapiens; identical to SEQ ID NO: 465477
  chr20:400915-401017
  hypo
  pancreas_gallbladder vs. sarcoma,melanoma

SEQ ID NO: 474920 - DNA, 266 bp, Homo sapiens; identical to SEQ ID NO: 458908
  chr20:3202153-3202419
  hypo
  pancreas_gallbladder vs. liver_bileduct

SEQ ID NO: 474921 - DNA, 414 bp, Homo sapiens; identical to SEQ ID NO: 347652
  chr20:4804008-4804422
  hypo
  pancreas_gallbladder vs. lymphoid_neoplasm

SEQ ID NO: 474922 - DNA, 108 bp, Homo sapiens; identical to SEQ ID NO: 462766
  chr20:30555779-30555887
  hypo
  pancreas_gallbladder vs. melanoma,uterine,ovary,renal, breast,thyroid

SEQ ID NO: 474923 - DNA, 248 bp, Homo sapiens; identical to SEQ ID NO: 352477
  chr20:30556403-30556651
  hypo
  pancreas_gallbladder vs. melanoma,uterine,ovary,renal, breast,thyroid

SEQ ID NO: 474924 - DNA, 100 bp, Homo sapiens; identical to SEQ ID NO: 352489
  chr20:37303401-37303501
  hypo
  pancreas_gallbladder vs. ovary,thyroid,non_cancer, multiple_myeloma

SEQ ID NO: 474925 - DNA, 390 bp, Homo sapiens; identical to SEQ ID NO: 455936
  chr20:37433723-37434113
  hypo
  pancreas_gallbladder vs. ovary

SEQ ID NO: 474926 - DNA, 27 bp, Homo sapiens
  chr20:37434086-37434113
  hypo
  pancreas_gallbladder vs. ovary,uterine,multiple_myeloma, bladder_and_urothelial
cggggtgggggttaggaaaactatttt

SEQ ID NO: 474927 - DNA, 55 bp, Homo sapiens; identical to SEQ ID NO: 368349
  chr20:42833281-42833336
  hypo
  pancreas_gallbladder vs. lymphoid_neoplasm, liver_bileduct

SEQ ID NO: 474928 - DNA, 192 bp, Homo sapiens; identical to SEQ ID NO: 455109
  chr20:45833348-45833540
  hypo
  pancreas_gallbladder vs. lymphoid_neoplasm,sarcoma, prostate

SEQ ID NO: 474929 - DNA, 23 bp, Homo sapiens
  chr20:45833568-45833591
  hypo
  pancreas_gallbladder vs. lymphoid_neoplasm,sarcoma, prostate
aaaatggacggtcggccgggcgc

SEQ ID NO: 474930 - DNA, 51 bp, Homo sapiens; identical to SEQ ID NO: 457931
  chr20:47934774-47934825
  hypo
  pancreas_gallbladder vs. sarcoma,ovary

SEQ ID NO: 474931 - DNA, 62 bp, Homo sapiens; identical to SEQ ID NO: 349032
  chr20:49218808-49218870
  hypo
  pancreas_gallbladder vs. liver_bileduct,cervical, melanoma,breast,renal

SEQ ID NO: 474932 - DNA, 18 bp, Homo sapiens
  chr20:49286725-49286743
  hypo
  pancreas_gallbladder vs. colorectal,melanoma
cgctctgagccaaggtag

SEQ ID NO: 474933 - DNA, 136 bp, Homo sapiens; identical to SEQ ID NO: 459635
  chr20:55206463-55206599
  hypo
  pancreas_gallbladder vs. breast,cervical, multiple_myeloma

SEQ ID NO: 474934 - DNA, 4 bp, Homo sapiens
  chr20:55206736-55206740
  hypo
  pancreas_gallbladder vs. breast,cervical, multiple_myeloma
cgag

SEQ ID NO: 474935 - DNA, 95 bp, Homo sapiens; identical to SEQ ID NO: 352515
  chr20:55206774-55206869
  hypo
  pancreas_gallbladder vs. breast,cervical, multiple_myeloma

SEQ ID NO: 474936 - DNA, 285 bp, Homo sapiens
  chr20:60925541-60925826
  hypo
  pancreas_gallbladder vs. liver_bileduct
gaacctttgtcctgtctgagctccacccgcctccccacctcccctgtaaactggagcgtggacagagcagtaaggccccacagaaggcaagggcgggtcccaaatccaagcgcatgaaagttgggctgctcggttgcaggcactagatgagccctgccagctccctgctgggggtccaggagcctcgtcacacactcagcctcagctgcaccactctgagtggcttctgtccagccccatgcctgcactgccaccctagggtgttacaccctccgggcaccacgc

SEQ ID NO: 474937 - DNA, 111 bp, Homo sapiens; identical to SEQ ID NO: 368448
  chr20:60926049-60926160
  hypo
  pancreas_gallbladder vs. liver_bileduct

SEQ ID NO: 474938 - DNA, 21 bp, Homo sapiens
  chr20:61506536-61506557
  hypo
  pancreas_gallbladder vs. lymphoid_neoplasm
gtgaattcatcggggagcccc

SEQ ID NO: 474939 - DNA, 22 bp, Homo sapiens
  chr20:62320890-62320912
  hypo
  pancreas_gallbladder vs. melanoma
cgtggtgtgattgtcacgggcc

SEQ ID NO: 474940 - DNA, 269 bp, Homo sapiens; identical to SEQ ID NO: 356359
  chr20:62322022-62322291
  hypo

SEQ ID NO: 474941 - DNA, 123 bp, Homo sapiens; identical to SEQ ID NO: 457941
  chr21:27011487-27011610
  hypo
  pancreas_gallbladder vs. sarcoma,uterine, lymphoid_neoplasm,multiple_myeloma,breast,head_and_neck, myeloid_neoplasm,ovary,thyroid,non_cancer,prostate

SEQ ID NO: 474942 - DNA, 134 bp, Homo sapiens; identical to SEQ ID NO: 457942
  chr21:27011639-27011773
  hypo
  pancreas_gallbladder vs. sarcoma,uterine, lymphoid_neoplasm,multiple_myeloma,breast,head_and_neck, myeloid_neoplasm,ovary,thyroid,non_cancer,prostate

SEQ ID NO: 474943 - DNA, 39 bp, Homo sapiens; identical to SEQ ID NO: 467139
  chr21:40032283-40032322
  hypo
  pancreas_gallbladder vs. colorectal

SEQ ID NO: 474944 - DNA, 159 bp, Homo sapiens; identical to SEQ ID NO: 467140
  chr21:40032367-40032526
  hypo
  pancreas_gallbladder vs. colorectal

SEQ ID NO: 474945 - DNA, 65 bp, Homo sapiens; identical to SEQ ID NO: 361990
  chr21:40032848-40032913
  hypo
  pancreas_gallbladder vs. colorectal

SEQ ID NO: 474946 - DNA, 34 bp, Homo sapiens; identical to SEQ ID NO: 459662
  chr21:44847478-44847512
  hypo
  pancreas_gallbladder vs. breast

SEQ ID NO: 474947 - DNA, 31 bp, Homo sapiens
  chr21:45140801-45140832
  hypo
  pancreas_gallbladder vs. lymphoid_neoplasm
cgggatcccccagcaatgtcctttgttctcg

SEQ ID NO: 474948 - DNA, 132 bp, Homo sapiens; identical to SEQ ID NO: 368581
  chr21:45140928-45141060
  hypo
  pancreas_gallbladder vs. lymphoid_neoplasm

SEQ ID NO: 474949 - DNA, 55 bp, Homo sapiens; identical to SEQ ID NO: 352575
  chr21:47062898-47062953
  hypo
  pancreas_gallbladder vs. lung

SEQ ID NO: 474950 - DNA, 143 bp, Homo sapiens; identical to SEQ ID NO: 453174
  chr21:47063290-47063433
  hypo
  pancreas_gallbladder vs. lung,melanoma,ovary,thyroid, prostate,non_cancer,colorectal

SEQ ID NO: 474951 - DNA, 96 bp, Homo sapiens; identical to SEQ ID NO: 455171
  chr21:47565081-47565177
  hypo
  pancreas_gallbladder vs. liver_bileduct

SEQ ID NO: 474952 - DNA, 337 bp, Homo sapiens; identical to SEQ ID NO: 383361
  chr21:47565270-47565607
  hypo
  pancreas_gallbladder vs. liver_bileduct

SEQ ID NO: 474953 - DNA, 119 bp, Homo sapiens; identical to SEQ ID NO: 472090
  chr22:18265358-18265477
  hypo
  pancreas_gallbladder vs. lung

SEQ ID NO: 474954 - DNA, 196 bp, Homo sapiens; identical to SEQ ID NO: 356476
  chr22:18265523-18265719
  hypo
  pancreas_gallbladder vs. lung

SEQ ID NO: 474955 - DNA, 119 bp, Homo sapiens
  chr22:20228961-20229080
  hypo
  pancreas_gallbladder vs. liver_bileduct,colorectal
cgtcgtccgatatttttacacaagtaaaataaaatgcatatctctatataccgcgatctgggtgggaggcggcgttctggaacaaacgctgccgccgaaccctgtaaacatgatggggt

SEQ ID NO: 474956 - DNA, 155 bp, Homo sapiens; identical to SEQ ID NO: 356487
  chr22:20229239-20229394
  hypo
  pancreas_gallbladder vs. liver_bileduct,colorectal

SEQ ID NO: 474957 - DNA, 137 bp, Homo sapiens; identical to SEQ ID NO: 453177
  chr22:22862472-22862609
  hypo
  pancreas_gallbladder vs. uterine

SEQ ID NO: 474958 - DNA, 46 bp, Homo sapiens; identical to SEQ ID NO: 474097
  chr22:26565120-26565166
  hypo
  pancreas_gallbladder vs. prostate

SEQ ID NO: 474959 - DNA, 284 bp, Homo sapiens; identical to SEQ ID NO: 362037
  chr22:26565999-26566283
  hypo
  pancreas_gallbladder vs. renal,sarcoma,lung,breast

SEQ ID NO: 474960 - DNA, 102 bp, Homo sapiens; identical to SEQ ID NO: 344747
  chr22:35821646-35821748
  hypo
  pancreas_gallbladder vs. liver_bileduct

SEQ ID NO: 474961 - DNA, 269 bp, Homo sapiens; identical to SEQ ID NO: 356530
  chr22:35848670-35848939
  hypo
  pancreas_gallbladder vs. lymphoid_neoplasm

SEQ ID NO: 474962 - DNA, 208 bp, Homo sapiens; identical to SEQ ID NO: 344754
  chr22:38146528-38146736
  hypo
  pancreas_gallbladder vs. liver_bileduct,colorectal

SEQ ID NO: 474963 - DNA, 391 bp, Homo sapiens; identical to SEQ ID NO: 368791
  chr22:38694593-38694984
  hypo
  pancreas_gallbladder vs. upper_gi

SEQ ID NO: 474964 - DNA, 106 bp, Homo sapiens; identical to SEQ ID NO: 349116
  chr22:41634855-41634961
  hypo
  pancreas_gallbladder vs. liver_bileduct

SEQ ID NO: 474965 - DNA, 137 bp, Homo sapiens; identical to SEQ ID NO: 344792
  chr22:41973298-41973435
  hypo
  pancreas_gallbladder vs. liver_bileduct,upper_gi

SEQ ID NO: 474966 - DNA, 768 bp, Homo sapiens; identical to SEQ ID NO: 356598
  chr22:50718718-50719486
  hypo
  pancreas_gallbladder vs. liver_bileduct

SEQ ID NO: 474967 - DNA, 996 bp, Homo sapiens; identical to SEQ ID NO: 472129
  chr22:50718994-50719990
  hypo
  pancreas_gallbladder vs. liver_bileduct

SEQ ID NO: 474968 - DNA, 517 bp, Homo sapiens; identical to SEQ ID NO: 344884
  chr22:50885403-50885920
  hypo
  pancreas_gallbladder vs. liver_bileduct

SEQ ID NO: 474969 - DNA, 153 bp, Homo sapiens; identical to SEQ ID NO: 356600
  chr22:50899708-50899861
  hypo
  pancreas_gallbladder vs. liver_bileduct, lymphoid_neoplasm

SEQ ID NO: 474970 - DNA, 110 bp, Homo sapiens; identical to SEQ ID NO: 338024
  chr3:10131952-10132062
  hypo
  pancreas_gallbladder vs. liver_bileduct,head_and_neck

SEQ ID NO: 474971 - DNA, 78 bp, Homo sapiens; identical to SEQ ID NO: 345081
  chr3:16555426-16555504
  hypo
  pancreas_gallbladder vs. lymphoid_neoplasm,anorectal, sarcoma,lung,liver_bileduct,renal

SEQ ID NO: 474972 - DNA, 99 bp, Homo sapiens
  chr3:42222621-42222720
  hypo
  pancreas_gallbladder vs. liver_bileduct
cgtttgtgtgctggaagccttccgcatccttcaggtgctctggcagtcccttgccatgcctgagccatcttcattattatgctgtgtgcttgatttgtt

SEQ ID NO: 474973 - DNA, 2 bp, Homo sapiens
  chr3:42222759-42222761
  hypo
  pancreas_gallbladder vs. liver_bileduct
gc

SEQ ID NO: 474974 - DNA, 333 bp, Homo sapiens; identical to SEQ ID NO: 455208
  chr3:53032401-53032734
  hypo
  pancreas_gallbladder vs. head_and_neck,lymphoid_neoplasm, sarcoma,prostate,renal,breast

SEQ ID NO: 474975 - DNA, 187 bp, Homo sapiens; identical to SEQ ID NO: 338174
  chr3:126472179-126472366
  hypo
  pancreas_gallbladder vs. liver_bileduct

SEQ ID NO: 474976 - DNA, 421 bp, Homo sapiens; identical to SEQ ID NO: 455219
  chr3:127394412-127394833
  hypo
  pancreas_gallbladder vs. liver_bileduct

SEQ ID NO: 474977 - DNA, 278 bp, Homo sapiens; identical to SEQ ID NO: 376862
  chr3:127394909-127395187
  hypo
  pancreas_gallbladder vs. liver_bileduct

SEQ ID NO: 474978 - DNA, 71 bp, Homo sapiens; identical to SEQ ID NO: 460368
  chr3:127534744-127534815
  hypo
  pancreas_gallbladder vs. cervical,head_and_neck, bladder_and_urothelial,renal

SEQ ID NO: 474979 - DNA, 68 bp, Homo sapiens; identical to SEQ ID NO: 460369
  chr3:127534897-127534965
  hypo
  pancreas_gallbladder vs. cervical,head_and_neck, bladder_and_urothelial,renal

SEQ ID NO: 474980 - DNA, 13 bp, Homo sapiens
  chr3:138679565-138679578
  hypo
  pancreas_gallbladder vs. myeloid_neoplasm
cgggcacagacgc

SEQ ID NO: 474981 - DNA, 124 bp, Homo sapiens; identical to SEQ ID NO: 455226
  chr3:141174173-141174297
  hypo
  pancreas_gallbladder vs. melanoma,lymphoid_neoplasm

SEQ ID NO: 474982 - DNA, 8 bp, Homo sapiens
  chr3:141174671-141174679
  hypo
  pancreas_gallbladder vs. melanoma,lymphoid_neoplasm
gtttcagc

SEQ ID NO: 474983 - DNA, 109 bp, Homo sapiens; identical to SEQ ID NO: 353392
  chr3:156543195-156543304
  hypo
  pancreas_gallbladder vs. head_and_neck,lymphoid_neoplasm, lung

SEQ ID NO: 474984 - DNA, 54 bp, Homo sapiens; identical to SEQ ID NO: 345815
  chr3:169540679-169540733
  hypo
  pancreas_gallbladder vs. sarcoma

SEQ ID NO: 474985 - DNA, 37 bp, Homo sapiens; identical to SEQ ID NO: 462827
  chr3:181430331-181430368
  hypo
  pancreas_gallbladder vs. upper_gi,lung,cervical

SEQ ID NO: 474986 - DNA, 146 bp, Homo sapiens; identical to SEQ ID NO: 474124
  chr3:181430443-181430589
  hypo
  pancreas_gallbladder vs. upper_gi,lung,cervical

SEQ ID NO: 474987 - DNA, 37 bp, Homo sapiens; identical to SEQ ID NO: 462827
  chr3:181430331-181430368
  hypo
  pancreas_gallbladder vs. upper_gi,lung

SEQ ID NO: 474988 - DNA, 253 bp, Homo sapiens; identical to SEQ ID NO: 462828
  chr3:181430443-181430696
  hypo
  pancreas_gallbladder vs. upper_gi,lung

SEQ ID NO: 474989 - DNA, 99 bp, Homo sapiens; identical to SEQ ID NO: 474127
  chr3:181430597-181430696
  hypo
  pancreas_gallbladder vs. upper_gi,head_and_neck, anorectal

SEQ ID NO: 474990 - DNA, 131 bp, Homo sapiens; identical to SEQ ID NO: 363404
  chr3:184059893-184060024
  hypo
  pancreas_gallbladder vs. lymphoid_neoplasm

SEQ ID NO: 474991 - DNA, 30 bp, Homo sapiens
  chr3:184459063-184459093
  hypo
  pancreas_gallbladder vs. colorectal
cgggagctgagaaagaagcagaggcctctt

SEQ ID NO: 474992 - DNA, 1 bp, Homo sapiens
  chr3:184459242-184459243
  hypo
  pancreas_gallbladder vs. colorectal
c

SEQ ID NO: 474993 - DNA, 133 bp, Homo sapiens; identical to SEQ ID NO: 453234
  chr3:186079331-186079464
  hypo
  pancreas_gallbladder vs. thyroid,non_cancer, lymphoid_neoplasm,sarcoma

SEQ ID NO: 474994 - DNA, 291 bp, Homo sapiens; identical to SEQ ID NO: 453235
  chr3:186079331-186079622
  hypo
  pancreas_gallbladder vs. lymphoid_neoplasm, myeloid_neoplasm,thyroid

SEQ ID NO: 474995 - DNA, 370 bp, Homo sapiens; identical to SEQ ID NO: 338300
  chr3:193586985-193587355
  hypo
  pancreas_gallbladder vs. head_and_neck,cervical

SEQ ID NO: 474996 - DNA, 54 bp, Homo sapiens; identical to SEQ ID NO: 338317
  chr3:195597381-195597435
  hypo
  pancreas_gallbladder vs. upper_gi

SEQ ID NO: 474997 - DNA, 393 bp, Homo sapiens; identical to SEQ ID NO: 338318
  chr3:195597835-195598228
  hypo
  pancreas_gallbladder vs. upper_gi,liver_bileduct, head_and_neck,melanoma,breast

SEQ ID NO: 474998 - DNA, 583 bp, Homo sapiens; identical to SEQ ID NO: 472571
  chr3:195599104-195599687
  hypo
  pancreas_gallbladder vs. liver_bileduct, bladder_and_urothelial,breast,prostate,colorectal, lymphoid_neoplasm,upper_gi,uterine

SEQ ID NO: 474999 - DNA, 163 bp, Homo sapiens; identical to SEQ ID NO: 473286
  chr3:195599840-195600003
  hypo
  pancreas_gallbladder vs. liver_bileduct, bladder_and_urothelial,breast,prostate,colorectal, lymphoid_neoplasm,upper_gi,uterine

SEQ ID NO: 475000 - DNA, 174 bp, Homo sapiens; identical to SEQ ID NO: 472572
  chr3:195599513-195599687
  hypo
  pancreas_gallbladder vs. liver_bileduct, bladder_and_urothelial,breast,prostate,colorectal, multiple_myeloma,lymphoid_neoplasm,uterine,melanoma,upper_gi

SEQ ID NO: 475001 - DNA, 247 bp, Homo sapiens; identical to SEQ ID NO: 473288
  chr3:195599840-195600087
  hypo
  pancreas_gallbladder vs. liver_bileduct, bladder_and_urothelial,breast,prostate,colorectal, multiple_myeloma,lymphoid_neoplasm,uterine,melanoma,upper_gi

SEQ ID NO: 475002 - DNA, 49 bp, Homo sapiens; identical to SEQ ID NO: 345828
  chr3:195601363-195601412
  hypo
  pancreas_gallbladder vs. bladder_and_urothelial,melanoma, cervical,liver_bileduct,breast,prostate,head_and_neck,anorectal, lymphoid_neoplasm

SEQ ID NO: 475003 - DNA, 2 bp, Homo sapiens
  chr3:195602314-195602316
  hypo
  pancreas_gallbladder vs. liver_bileduct,lung, head_and_neck
cg

SEQ ID NO: 475004 - DNA, 27 bp, Homo sapiens
  chr3:195602337-195602364
  hypo
  pancreas_gallbladder vs. liver_bileduct,lung, head_and_neck
ctccccctcgggatggcgcccacgcac

SEQ ID NO: 475005 - DNA, 666 bp, Homo sapiens; identical to SEQ ID NO: 353426
  chr3:195602576-195603242
  hypo
  pancreas_gallbladder vs. liver_bileduct,lung, head_and_neck

SEQ ID NO: 475006 - DNA, 340 bp, Homo sapiens; identical to SEQ ID NO: 461972
  chr3:195603923-195604263
  hypo
  pancreas_gallbladder vs. bladder_and_urothelial

SEQ ID NO: 475007 - DNA, 159 bp, Homo sapiens; identical to SEQ ID NO: 363440
  chr3:195604388-195604547
  hypo
  pancreas_gallbladder vs. bladder_and_urothelial

SEQ ID NO: 475008 - DNA, 105 bp, Homo sapiens; identical to SEQ ID NO: 455251
  chr3:196754412-196754517
  hypo
  pancreas_gallbladder vs. liver_bileduct,head_and_neck, lymphoid_neoplasm

SEQ ID NO: 475009 - DNA, 118 bp, Homo sapiens; identical to SEQ ID NO: 363449
  chr3:196754758-196754876
  hypo
  pancreas_gallbladder vs. liver_bileduct,head_and_neck, lymphoid_neoplasm

SEQ ID NO: 475010 - DNA, 172 bp, Homo sapiens; identical to SEQ ID NO: 474136
  chr4:657350-657522
  hypo
  pancreas_gallbladder vs. ovary

SEQ ID NO: 475011 - DNA, 115 bp, Homo sapiens; identical to SEQ ID NO: 474137
  chr4:657552-657667
  hypo
  pancreas_gallbladder vs. ovary

SEQ ID NO: 475012 - DNA, 139 bp, Homo sapiens; identical to SEQ ID NO: 357804
  chr4:657712-657851
  hypo
  pancreas_gallbladder vs. ovary

SEQ ID NO: 475013 - DNA, 189 bp, Homo sapiens; identical to SEQ ID NO: 460382
  chr4:905682-905871
  hypo
  pancreas_gallbladder vs. liver_bileduct,head_and_neck, lymphoid_neoplasm,breast,anorectal,ovary,lung,renal, bladder_and_urothelial

SEQ ID NO: 475014 - DNA, 18 bp, Homo sapiens
  chr4:905932-905950
  hypo
  pancreas_gallbladder vs. liver_bileduct,head_and_neck, lymphoid_neoplasm,breast,anorectal,ovary,lung,renal, bladder_and_urothelial
gcagccggcgggctctcc

SEQ ID NO: 475015 - DNA, 12 bp, Homo sapiens
  chr4:1093389-1093401
  hypo
cgcacaatcccc

SEQ ID NO: 475016 - DNA, 62 bp, Homo sapiens
  chr4:1093475-1093537
  hypo
gtaacgaggatacatagttaaatctcacagcgtgactgaaggcctttgctgcgtctgacgtc

SEQ ID NO: 475017 - DNA, 55 bp, Homo sapiens; identical to SEQ ID NO: 338372
  chr4:1323674-1323729
  hypo
  pancreas_gallbladder vs. upper_gi

SEQ ID NO: 475018 - DNA, 129 bp, Homo sapiens; identical to SEQ ID NO: 338373
  chr4:1326104-1326233
  hypo
  pancreas_gallbladder vs. liver_bileduct

SEQ ID NO: 475019 - DNA, 167 bp, Homo sapiens; identical to SEQ ID NO: 338374
  chr4:1326509-1326676
  hypo
  pancreas_gallbladder vs. liver_bileduct

SEQ ID NO: 475020 - DNA, 116 bp, Homo sapiens
  chr4:1330895-1331011
  hypo
  pancreas_gallbladder vs. upper_gi
cgagctcccgtgtgctgcacttgcgtggtgtctggatggtcggggtggggccgtgttgaggggcctcggatgcgtcgtgcagccttcactctgggaagtggcgcgcttcctctctc

SEQ ID NO: 475021 - DNA, 27 bp, Homo sapiens
  chr4:1331117-1331144
  hypo
  pancreas_gallbladder vs. upper_gi
aaccttgcctgtgactgactctgtccc

SEQ ID NO: 475022 - DNA, 29 bp, Homo sapiens
  chr4:1331705-1331734
  hypo
  pancreas_gallbladder vs. melanoma,lymphoid_neoplasm, sarcoma,prostate,multiple_myeloma,cervical,upper_gi,lung, uterine,breast,bladder_and_urothelial
ttcatgtgacctgcctcaggcccagaggg

SEQ ID NO: 475023 - DNA, 373 bp, Homo sapiens; identical to SEQ ID NO: 453957
  chr4:1331896-1332269
  hypo
  pancreas_gallbladder vs. melanoma,lymphoid_neoplasm, sarcoma,prostate,multiple_myeloma,cervical,upper_gi,lung, uterine,breast,bladder_and_urothelial

SEQ ID NO: 475024 - DNA, 321 bp, Homo sapiens
  chr4:1331948-1332269
  hypo
  pancreas_gallbladder vs. prostate,lymphoid_neoplasm, sarcoma,melanoma,liver_bileduct,bladder_and_urothelial
cggagccactctgtgcctgtggtcctggtgctggaggccggggtgagaaggcgcaggcttcttgtctccaccgaggcctcagtggggctgtttagctgtcgagtgcagcacttcctgtgcctcgaaagacagccccgtgtagtcagcatggcgcccacatagccagaagggcacgcagcccagggcagagtggccacagggggctgggctcaccccggctgccctgagtggcccccaacccttccttgacccgatgctcagacagtgctacaaggaggacggcagctccaagagccctgactgccctgtgtgcagccgctc

SEQ ID NO: 475025 - DNA, 219 bp, Homo sapiens; identical to SEQ ID NO: 474142
  chr4:1332660-1332879
  hypo
  pancreas_gallbladder vs. prostate,lymphoid_neoplasm, sarcoma,melanoma,liver_bileduct,bladder_and_urothelial

SEQ ID NO: 475026 - DNA, 219 bp, Homo sapiens; identical to SEQ ID NO: 474142
  chr4:1332660-1332879
  hypo
  pancreas_gallbladder vs. prostate,lymphoid_neoplasm, multiple_myeloma,bladder_and_urothelial,uterine,melanoma, sarcoma

SEQ ID NO: 475027 - DNA, 252 bp, Homo sapiens
  chr4:1333183-1333435
  hypo
  pancreas_gallbladder vs. prostate,lymphoid_neoplasm, multiple_myeloma,bladder_and_urothelial,uterine,melanoma, sarcoma
gcttctgaaaagtactttcaacttgcgaaggaaactcttctttaaagactgacctaaacaccgagggaaacttaagaacgtttaaaatataggagtccgtgatttccctgtgttttcagtttctttccttctgtgaacgatgagacttggagaacgggctggtccttcaccacttcctgttggccctggcctggccggggaaggtggcagcggcaccggactgacctgcagtgacccgcgatgccgcgccac

SEQ ID NO: 475028 - DNA, 520 bp, Homo sapiens; identical to SEQ ID NO: 353456
  chr4:1333183-1333703
  hypo
  pancreas_gallbladder vs. lymphoid_neoplasm, multiple_myeloma,prostate,liver_bileduct,uterine, bladder_and_urothelial,melanoma,lung

SEQ ID NO: 475029 - DNA, 211 bp, Homo sapiens; identical to SEQ ID NO: 338386
  chr4:1791547-1791758
  hypo
  pancreas_gallbladder vs. liver_bileduct

SEQ ID NO: 475030 - DNA, 57 bp, Homo sapiens; identical to SEQ ID NO: 456997
  chr4:1993659-1993716
  hypo
  pancreas_gallbladder vs. lymphoid_neoplasm, liver_bileduct,prostate

SEQ ID NO: 475031 - DNA, 197 bp, Homo sapiens; identical to SEQ ID NO: 348041
  chr4:1994335-1994532
  hypo
  pancreas_gallbladder vs. lymphoid_neoplasm, liver_bileduct,prostate

SEQ ID NO: 475032 - DNA, 82 bp, Homo sapiens; identical to SEQ ID NO: 363511
  chr4:2459899-2459981
  hypo
  pancreas_gallbladder vs. lymphoid_neoplasm,renal, liver_bileduct

SEQ ID NO: 475033 - DNA, 178 bp, Homo sapiens; identical to SEQ ID NO: 338443
  chr4:7844888-7845066
  hypo
  pancreas_gallbladder vs. upper_gi

SEQ ID NO: 475034 - DNA, 21 bp, Homo sapiens
  chr4:8386124-8386145
  hypo
  pancreas_gallbladder vs. liver_bileduct
cgctgaaacaaactaggcagg

SEQ ID NO: 475035 - DNA, 29 bp, Homo sapiens
  chr4:8386315-8386344
  hypo
  pancreas_gallbladder vs. liver_bileduct
ccgccctgtgcacccaatgactgcccctc

SEQ ID NO: 475036 - DNA, 25 bp, Homo sapiens
  chr4:10459327-10459352
  hypo
  pancreas_gallbladder vs. anorectal,prostate,sarcoma, breast,head_and_neck,non_cancer,uterine,lung,thyroid, bladder_and_urothelial,cervical,multiple_myeloma
gggtcccgcggagggcggccttggc

SEQ ID NO: 475037 - DNA, 16 bp, Homo sapiens
  chr4:41259850-41259866
  hypo
  pancreas_gallbladder vs. ovary,cervical,lung,breast, renal
aggtgatgcggggcgc

SEQ ID NO: 475038 - DNA, 94 bp, Homo sapiens; identical to SEQ ID NO: 458065
  chr4:57687545-57687639
  hypo
  pancreas_gallbladder vs. lung,ovary,colorectal, head_and_neck,anorectal,bladder_and_urothelial

SEQ ID NO: 475039 - DNA, 151 bp, Homo sapiens; identical to SEQ ID NO: 357899
  chr4:81124731-81124882
  hypo
  pancreas_gallbladder vs. lung,colorectal,thyroid

SEQ ID NO: 475040 - DNA, 140 bp, Homo sapiens; identical to SEQ ID NO: 474166
  chr4:111543735-111543875
  hypo
  pancreas_gallbladder vs. colorectal

SEQ ID NO: 475041 - DNA, 233 bp, Homo sapiens; identical to SEQ ID NO: 461074
  chr4:111543735-111543968
  hypo
  pancreas_gallbladder vs. colorectal,cervical

SEQ ID NO: 475042 - DNA, 61 bp, Homo sapiens; identical to SEQ ID NO: 461075
  chr4:111543907-111543968
  hypo
  pancreas_gallbladder vs. colorectal

SEQ ID NO: 475043 - DNA, 243 bp, Homo sapiens; identical to SEQ ID NO: 462856
  chr4:113436585-113436828
  hypo
  pancreas_gallbladder vs. sarcoma,uterine,ovary

SEQ ID NO: 475044 - DNA, 113 bp, Homo sapiens; identical to SEQ ID NO: 462859
  chr4:113438278-113438391
  hypo
  pancreas_gallbladder vs. bladder_and_urothelial

SEQ ID NO: 475045 - DNA, 229 bp, Homo sapiens; identical to SEQ ID NO: 464557
  chr4:113438278-113438507
  hypo
  pancreas_gallbladder vs. bladder_and_urothelial,uterine

SEQ ID NO: 475046 - DNA, 161 bp, Homo sapiens; identical to SEQ ID NO: 473338
  chr5:600977-601138
  hypo
  pancreas_gallbladder vs. head_and_neck,melanoma,cervical, bladder_and_urothelial,lymphoid_neoplasm,lung,renal

SEQ ID NO: 475047 - DNA, 263 bp, Homo sapiens; identical to SEQ ID NO: 353539
  chr5:601222-601485
  hypo
  pancreas_gallbladder vs. head_and_neck,melanoma,cervical, bladder_and_urothelial,lymphoid_neoplasm,lung,renal

SEQ ID NO: 475048 - DNA, 171 bp, Homo sapiens; identical to SEQ ID NO: 456015
  chr5:10564301-10564472
  hypo
  pancreas_gallbladder vs. lymphoid_neoplasm, myeloid_neoplasm,cervical,renal,thyroid,non_cancer,ovary, sarcoma,head_and_neck,bladder_and_urothelial,uterine,anorectal, multiple_myeloma

SEQ ID NO: 475049 - DNA, 42 bp, Homo sapiens; identical to SEQ ID NO: 474198
  chr5:15500076-15500118
  hypo
  pancreas_gallbladder vs. anorectal

SEQ ID NO: 475050 - DNA, 53 bp, Homo sapiens; identical to SEQ ID NO: 462874
  chr5:17217629-17217682
  hypo
  pancreas_gallbladder vs. lung,anorectal, bladder_and_urothelial,lymphoid_neoplasm,uterine,breast,sarcoma, prostate

SEQ ID NO: 475051 - DNA, 38 bp, Homo sapiens; identical to SEQ ID NO: 456033
  chr5:77268330-77268368
  hypo
  pancreas_gallbladder vs. ovary,myeloid_neoplasm,thyroid

SEQ ID NO: 475052 - DNA, 91 bp, Homo sapiens; identical to SEQ ID NO: 338770
  chr5:98239940-98240031
  hypo
  pancreas_gallbladder vs. head_and_neck,colorectal, cervical,breast,anorectal,upper_gi

SEQ ID NO: 475053 - DNA, 391 bp, Homo sapiens; identical to SEQ ID NO: 338801
  chr5:135091190-135091581
  hypo
  pancreas_gallbladder vs. colorectal

SEQ ID NO: 475054 - DNA, 32 bp, Homo sapiens; identical to SEQ ID NO: 465655
  chr5:142625544-142625576
  hypo
  pancreas_gallbladder vs. upper_gi,colorectal, lymphoid_neoplasm

SEQ ID NO: 475055 - DNA, 2 bp, Homo sapiens
  chr5:171382146-171382148
  hypo
  pancreas_gallbladder vs. lymphoid_neoplasm,sarcoma, colorectal,melanoma,uterine
cg

SEQ ID NO: 475056 - DNA, 210 bp, Homo sapiens; identical to SEQ ID NO: 458169
  chr5:176057164-176057374
  hypo
  pancreas_gallbladder vs. head_and_neck,ovary,uterine

SEQ ID NO: 475057 - DNA, 842 bp, Homo sapiens; identical to SEQ ID NO: 353703
  chr5:176918897-176919739
  hypo
  pancreas_gallbladder vs. upper_gi,liver_bileduct

SEQ ID NO: 475058 - DNA, 24 bp, Homo sapiens
  chr5:177031080-177031104
  hypo
  pancreas_gallbladder vs. head_and_neck
cgagttatgtgcagcctcctcgtg

SEQ ID NO: 475059 - DNA, 18 bp, Homo sapiens
  chr5:177031565-177031583
  hypo
  pancreas_gallbladder vs. head_and_neck
ccctcggcacccctgccc

SEQ ID NO: 475060 - DNA, 95 bp, Homo sapiens
  chr5:177680780-177680875
  hypo
cgtgtttttatttttttaacatcatgccctgcatggactatggctgcccgctgcccatcaaactgagtcggcatctcagtctggcatccaaagtc

SEQ ID NO: 475061 - DNA, 7 bp, Homo sapiens
  chr5:177680895-177680902
  hypo
ggctcac

SEQ ID NO: 475062 - DNA, 184 bp, Homo sapiens; identical to SEQ ID NO: 358338
  chr5:178594471-178594655
  hypo
  pancreas_gallbladder vs. upper_gi,anorectal,ovary

SEQ ID NO: 475063 - DNA, 289 bp, Homo sapiens; identical to SEQ ID NO: 459760
  chr5:178770455-178770744
  hypo
  pancreas_gallbladder vs. bladder_and_urothelial

SEQ ID NO: 475064 - DNA, 55 bp, Homo sapiens; identical to SEQ ID NO: 346767
  chr6:393764-393819
  hypo
  pancreas_gallbladder vs. lymphoid_neoplasm, myeloid_neoplasm,melanoma,non_cancer,thyroid,multiple_myeloma, sarcoma,prostate

SEQ ID NO: 475065 - DNA, 394 bp, Homo sapiens; identical to SEQ ID NO: 469266
  chr6:710660-711054
  hypo
  pancreas_gallbladder vs. upper_gi,cervical, bladder_and_urothelial,colorectal

SEQ ID NO: 475066 - DNA, 543 bp, Homo sapiens; identical to SEQ ID NO: 338928
  chr6:1080648-1081191
  hypo
  pancreas_gallbladder vs. colorectal

SEQ ID NO: 475067 - DNA, 80 bp, Homo sapiens; identical to SEQ ID NO: 350268
  chr6:6009552-6009632
  hypo
  pancreas_gallbladder vs. colorectal

SEQ ID NO: 475068 - DNA, 214 bp, Homo sapiens; identical to SEQ ID NO: 464663
  chr6:26198924-26199138
  hypo
  pancreas_gallbladder vs. liver_bileduct,upper_gi, bladder_and_urothelial,cervical,colorectal,melanoma, head_and_neck,anorectal,uterine,prostate,breast,non_cancer, lymphoid_neoplasm

SEQ ID NO: 475069 - DNA, 16 bp, Homo sapiens
  chr6:26199167-26199183
  hypo
  pancreas_gallbladder vs. liver_bileduct,upper_gi, bladder_and_urothelial,cervical,colorectal,melanoma, head_and_neck,anorectal,uterine,prostate,breast,non_cancer, lymphoid_neoplasm
tgactttacccagcaa

SEQ ID NO: 475070 - DNA, 16 bp, Homo sapiens
  chr6:26199167-26199183
  hypo
  pancreas_gallbladder vs. liver_bileduct,upper_gi, bladder_and_urothelial,cervical,colorectal,head_and_neck, melanoma,anorectal,uterine,prostate,breast,non_cancer, lymphoid_neoplasm
tgactttacccagcaa

SEQ ID NO: 475071 - DNA, 2 bp, Homo sapiens
  chr6:26199878-26199880
  hypo
  pancreas_gallbladder vs. liver_bileduct,upper_gi, bladder_and_urothelial,cervical,colorectal,head_and_neck, melanoma,anorectal,uterine,prostate,breast,non_cancer, lymphoid_neoplasm
gc

SEQ ID NO: 475072 - DNA, 314 bp, Homo sapiens; identical to SEQ ID NO: 455328
  chr6:37023826-37024140
  hypo
  pancreas_gallbladder vs. melanoma,lymphoid_neoplasm, renal,sarcoma

SEQ ID NO: 475073 - DNA, 57 bp, Homo sapiens; identical to SEQ ID NO: 364043
  chr6:43478745-43478802
  hypo
  pancreas_gallbladder vs. lymphoid_neoplasm

SEQ ID NO: 475074 - DNA, 358 bp, Homo sapiens; identical to SEQ ID NO: 455332
  chr6:47202003-47202361
  hypo
  pancreas_gallbladder vs. colorectal

SEQ ID NO: 475075 - DNA, 155 bp, Homo sapiens; identical to SEQ ID NO: 353787
  chr6:47202453-47202608
  hypo
  pancreas_gallbladder vs. colorectal

SEQ ID NO: 475076 - DNA, 73 bp, Homo sapiens; identical to SEQ ID NO: 455334
  chr6:52344303-52344376
  hypo
  pancreas_gallbladder vs. liver_bileduct,melanoma, lymphoid_neoplasm,uterine,renal,ovary,colorectal,prostate

SEQ ID NO: 475077 - DNA, 159 bp, Homo sapiens; identical to SEQ ID NO: 348153
  chr6:52344405-52344564
  hypo
  pancreas_gallbladder vs. liver_bileduct,melanoma, lymphoid_neoplasm,uterine,renal,ovary,colorectal,prostate

SEQ ID NO: 475078 - DNA, 9 bp, Homo sapiens
  chr6:73333099-73333108
  hypo
  pancreas_gallbladder vs. head_and_neck,lung,breast, anorectal,lymphoid_neoplasm,thyroid
ttgtggcgc

SEQ ID NO: 475079 - DNA, 372 bp, Homo sapiens; identical to SEQ ID NO: 346840
  chr6:91005702-91006074
  hypo
  pancreas_gallbladder vs. head_and_neck,anorectal, cervical,lymphoid_neoplasm

SEQ ID NO: 475080 - DNA, 85 bp, Homo sapiens; identical to SEQ ID NO: 339113
  chr6:109053387-109053472
  hypo
  pancreas_gallbladder vs. liver_bileduct

SEQ ID NO: 475081 - DNA, 440 bp, Homo sapiens; identical to SEQ ID NO: 453397
  chr6:127836226-127836666
  hypo
  pancreas_gallbladder vs. lung

SEQ ID NO: 475082 - DNA, 225 bp, Homo sapiens; identical to SEQ ID NO: 453398
  chr6:127836441-127836666
  hypo
  pancreas_gallbladder vs. lung

SEQ ID NO: 475083 - DNA, 31 bp, Homo sapiens; identical to SEQ ID NO: 350458
  chr6:127837749-127837780
  hypo
  pancreas_gallbladder vs. lung

SEQ ID NO: 475084 - DNA, 23 bp, Homo sapiens
  chr6:155568750-155568773
  hypo
  pancreas_gallbladder vs. upper_gi
cgcacctggccacgcttcatggc

SEQ ID NO: 475085 - DNA, 297 bp, Homo sapiens
  chr6:155568912-155569209
  hypo
  pancreas_gallbladder vs. upper_gi
atcctcggaagctcccagcactccagggctctgtcagggctgtgaggcggaatcccacgctgacagctgggtgcctgacccactgatgtgttggggttttcattaaagaatggcattaggaggactatagaaatagatgatctataaatgttaaaagagaaatgaagaatttaattcaccccactgtgctcttctgaggtcttttatccatctgcttgtagctaaaactgacaaagccttcaaggcttttctggacgcccggaaccccaccaagcagcattcctccacgctggagtc

SEQ ID NO: 475086 - DNA, 140 bp, Homo sapiens; identical to SEQ ID NO: 353840
  chr6:155569349-155569489
  hypo
  pancreas_gallbladder vs. upper_gi

SEQ ID NO: 475087 - DNA, 41 bp, Homo sapiens; identical to SEQ ID NO: 346866
  chr6:159591277-159591318
  hypo
  pancreas_gallbladder vs. sarcoma,prostate,lung, myeloid_neoplasm,thyroid

SEQ ID NO: 475088 - DNA, 106 bp, Homo sapiens; identical to SEQ ID NO: 460454
  chr6:167834910-167835016
  hypo
  pancreas_gallbladder vs. cervical,lymphoid_neoplasm

SEQ ID NO: 475089 - DNA, 101 bp, Homo sapiens; identical to SEQ ID NO: 455361
  chr7:409502-409603
  hypo
  pancreas_gallbladder vs. liver_bileduct, lymphoid_neoplasm

SEQ ID NO: 475090 - DNA, 46 bp, Homo sapiens; identical to SEQ ID NO: 455362
  chr7:409781-409827
  hypo
  pancreas_gallbladder vs. liver_bileduct, lymphoid_neoplasm

SEQ ID NO: 475091 - DNA, 95 bp, Homo sapiens; identical to SEQ ID NO: 455363
  chr7:409892-409987
  hypo
  pancreas_gallbladder vs. liver_bileduct, lymphoid_neoplasm

SEQ ID NO: 475092 - DNA, 137 bp, Homo sapiens
  chr7:808392-808529
  hypo
  pancreas_gallbladder vs. liver_bileduct
cgtcagcgtgcttctttttcccatcccaggagttggacttgacctgtggacatttggctgttttctttttgtttttaagccagaaacactgtcttgtttccagtttaagatgtagagagggtgaaacagtcagaaac

SEQ ID NO: 475093 - DNA, 242 bp, Homo sapiens
  chr7:808577-808819
  hypo
  pancreas_gallbladder vs. liver_bileduct
gactcgtgctctggcgggaggctcaagtcaggcgtcccagcagcttcggtgcaacgcctcctgcccggctgcgtggggaggccctccaagacaccagctggtctcaccgcgaggcctgacttcgagccagagcagcgagtacattgcgtctccgtgtggcaagggcaggtgcgggggtctcagtccactaccgagcagcctgctctgatgactggcggcgccagggagaaggctcacatcgc

SEQ ID NO: 475094 - DNA, 382 bp, Homo sapiens; identical to SEQ ID NO: 364209
  chr7:808848-809230
  hypo
  pancreas_gallbladder vs. liver_bileduct

SEQ ID NO: 475095 - DNA, 59 bp, Homo sapiens; identical to SEQ ID NO: 460460
  chr7:834245-834304
  hypo
  pancreas_gallbladder vs. liver_bileduct,melanoma,lung, breast,lymphoid_neoplasm,bladder_and_urothelial,prostate, uterine

SEQ ID NO: 475096 - DNA, 317 bp, Homo sapiens; identical to SEQ ID NO: 353881
  chr7:834873-835190
  hypo
  pancreas_gallbladder vs. liver_bileduct,melanoma,lung, breast,lymphoid_neoplasm,bladder_and_urothelial,prostate, uterine

SEQ ID NO: 475097 - DNA, 171 bp, Homo sapiens; identical to SEQ ID NO: 460462
  chr7:965802-965973
  hypo
  pancreas_gallbladder vs. lung,bladder_and_urothelial

SEQ ID NO: 475098 - DNA, 501 bp, Homo sapiens; identical to SEQ ID NO: 364219
  chr7:966009-966510
  hypo
  pancreas_gallbladder vs. lung,bladder_and_urothelial

SEQ ID NO: 475099 - DNA, 115 bp, Homo sapiens
  chr7:1115608-1115723
  hypo
  pancreas_gallbladder vs. upper_gi,colorectal
cggggctgccactctccagggcgccccactcccagctccagcggctgagtccaccaagccaggacaggcccaaggaccagagggcgaggtgattcacagtggagctcggaaagac

SEQ ID NO: 475100 - DNA, 20 bp, Homo sapiens
  chr7:1408460-1408480
  hypo
  pancreas_gallbladder vs. anorectal,breast,uterine
cgggctctcagccaaccagc

SEQ ID NO: 475101 - DNA, 234 bp, Homo sapiens; identical to SEQ ID NO: 474310
  chr7:1705153-1705387
  hypo
  pancreas_gallbladder vs. sarcoma,lung

SEQ ID NO: 475102 - DNA, 60 bp, Homo sapiens; identical to SEQ ID NO: 474311
  chr7:1705693-1705753
  hypo
  pancreas_gallbladder vs. sarcoma,lung

SEQ ID NO: 475103 - DNA, 121 bp, Homo sapiens; identical to SEQ ID NO: 459812
  chr7:1705266-1705387
  hypo
  pancreas_gallbladder vs. sarcoma

SEQ ID NO: 475104 - DNA, 503 bp, Homo sapiens; identical to SEQ ID NO: 459813
  chr7:1705693-1706196
  hypo
  pancreas_gallbladder vs. sarcoma

SEQ ID NO: 475105 - DNA, 46 bp, Homo sapiens
  chr7:1970797-1970843
  hypo
  pancreas_gallbladder vs. liver_bileduct,head_and_neck, bladder_and_urothelial,breast,cervical,lymphoid_neoplasm,lung, upper_gi,colorectal,prostate,melanoma,anorectal
cgcacggtcacaggagcgagggcgcgtcgtggggtccacgtcaagg

SEQ ID NO: 475106 - DNA, 88 bp, Homo sapiens; identical to SEQ ID NO: 348188
  chr7:1970921-1971009
  hypo
  pancreas_gallbladder vs. liver_bileduct,head_and_neck, bladder_and_urothelial,breast,cervical,lymphoid_neoplasm,lung, upper_gi,colorectal,prostate,melanoma,anorectal

SEQ ID NO: 475107 - DNA, 307 bp, Homo sapiens; identical to SEQ ID NO: 364246
  chr7:1997037-1997344
  hypo
  pancreas_gallbladder vs. liver_bileduct

SEQ ID NO: 475108 - DNA, 475 bp, Homo sapiens; identical to SEQ ID NO: 339336
  chr7:2264018-2264493
  hypo
  pancreas_gallbladder vs. upper_gi

SEQ ID NO: 475109 - DNA, 30 bp, Homo sapiens; identical to SEQ ID NO: 473411
  chr7:2264982-2265012
  hypo
  pancreas_gallbladder vs. melanoma,lymphoid_neoplasm, upper_gi,bladder_and_urothelial,prostate

SEQ ID NO: 475110 - DNA, 290 bp, Homo sapiens; identical to SEQ ID NO: 473412
  chr7:2265241-2265531
  hypo
  pancreas_gallbladder vs. melanoma,lymphoid_neoplasm, upper_gi,bladder_and_urothelial,prostate

SEQ ID NO: 475111 - DNA, 254 bp, Homo sapiens; identical to SEQ ID NO: 339342
  chr7:2477361-2477615
  hypo
  pancreas_gallbladder vs. liver_bileduct

SEQ ID NO: 475112 - DNA, 171 bp, Homo sapiens; identical to SEQ ID NO: 364271
  chr7:2566658-2566829
  hypo
  pancreas_gallbladder vs. cervical,sarcoma

SEQ ID NO: 475113 - DNA, 238 bp, Homo sapiens
  chr7:2566658-2566896
  hypo
  pancreas_gallbladder vs. sarcoma,cervical
tagaggtgtcccccggagtcctgcttgctcggggtggggccgccagtgttgtgggactgcaaatgggagctcagcacctgcctgccacccacgcagaccagcccctgctctgttcccacaggttccgctccatccactgccacctgtacccggacacaccctggtgtccccgcactgccatcttctagtggccatggctgagacccaatccctgggcgcccctggtatccaaagggcc

SEQ ID NO: 475114 - DNA, 195 bp, Homo sapiens; identical to SEQ ID NO: 378015
  chr7:2566939-2567134
  hypo
  pancreas_gallbladder vs. sarcoma,cervical

SEQ ID NO: 475115 - DNA, 3 bp, Homo sapiens
  chr7:6124618-6124621
  hypo
  pancreas_gallbladder vs. lymphoid_neoplasm
cga

SEQ ID NO: 475116 - DNA, 3 bp, Homo sapiens
  chr7:6525091-6525094
  hypo
  pancreas_gallbladder vs. lymphoid_neoplasm
ttc

SEQ ID NO: 475117 - DNA, 62 bp, Homo sapiens; identical to SEQ ID NO: 463000
  chr7:6570393-6570455
  hypo
  pancreas_gallbladder vs. uterine,ovary

SEQ ID NO: 475118 - DNA, 210 bp, Homo sapiens; identical to SEQ ID NO: 457105
  chr7:7605822-7606032
  hypo
  pancreas_gallbladder vs. lymphoid_neoplasm,melanoma, sarcoma,multiple_myeloma

SEQ ID NO: 475119 - DNA, 60 bp, Homo sapiens; identical to SEQ ID NO: 454474
  chr7:19156644-19156704
  hypo
  pancreas_gallbladder vs. sarcoma,melanoma,prostate,ovary, uterine,anorectal,head_and_neck,multiple_myeloma,breast, myeloid_neoplasm,non_cancer,thyroid,cervical,lung

SEQ ID NO: 475120 - DNA, 60 bp, Homo sapiens; identical to SEQ ID NO: 454474
  chr7:19156644-19156704
  hypo
  pancreas_gallbladder vs. anorectal,uterine,sarcoma, breast,head_and_neck,prostate,myeloid_neoplasm,ovary,non_cancer, thyroid,multiple_myeloma

SEQ ID NO: 475121 - DNA, 16 bp, Homo sapiens
  chr7:20826098-20826114
  hypo
  pancreas_gallbladder vs. colorectal
cgaaatcggtgcctgt

SEQ ID NO: 475122 - DNA, 298 bp, Homo sapiens; identical to SEQ ID NO: 467631
  chr7:20826202-20826500
  hypo
  pancreas_gallbladder vs. colorectal

SEQ ID NO: 475123 - DNA, 142 bp, Homo sapiens; identical to SEQ ID NO: 345270
  chr7:27136790-27136932
  hypo
  pancreas_gallbladder vs. ovary,multiple_myeloma, non_cancer,anorectal,bladder_and_urothelial,cervical,melanoma, renal,lymphoid_neoplasm,head_and_neck,sarcoma,prostate, colorectal,uterine,myeloid_neoplasm,thyroid,upper_gi,breast

SEQ ID NO: 475124 - DNA, 34 bp, Homo sapiens; identical to SEQ ID NO: 455390
  chr7:27686735-27686769
  hypo
  pancreas_gallbladder vs. upper_gi,colorectal, lymphoid_neoplasm

SEQ ID NO: 475125 - DNA, 45 bp, Homo sapiens; identical to SEQ ID NO: 353958
  chr7:27686815-27686860
  hypo
  pancreas_gallbladder vs. upper_gi,colorectal, lymphoid_neoplasm

SEQ ID NO: 475126 - DNA, 54 bp, Homo sapiens; identical to SEQ ID NO: 457122
  chr7:30603338-30603392
  hypo
  pancreas_gallbladder vs. liver_bileduct,colorectal

SEQ ID NO: 475127 - DNA, 110 bp, Homo sapiens; identical to SEQ ID NO: 378122
  chr7:30603436-30603546
  hypo
  pancreas_gallbladder vs. liver_bileduct,colorectal

SEQ ID NO: 475128 - DNA, 7 bp, Homo sapiens
  chr7:37487365-37487372
  hypo
  pancreas_gallbladder vs. uterine,ovary,lymphoid_neoplasm, breast,thyroid,myeloid_neoplasm,non_cancer,multiple_myeloma, prostate,sarcoma,renal,liver_bileduct,lung,melanoma, bladder_and_urothelial
cgctcgc

SEQ ID NO: 475129 - DNA, 1 bp, Homo sapiens
  chr7:45613422-45613423
  hypo
  pancreas_gallbladder vs. bladder_and_urothelial,lung, sarcoma,uterine,prostate,breast,thyroid,non_cancer,anorectal, head_and_neck,myeloid_neoplasm,renal
c

SEQ ID NO: 475130 - DNA, 102 bp, Homo sapiens; identical to SEQ ID NO: 345274
  chr7:50344738-50344840
  hypo
  pancreas_gallbladder vs. anorectal,lymphoid_neoplasm, multiple_myeloma,head_and_neck,non_cancer,uterine, myeloid_neoplasm,ovary

SEQ ID NO: 475131 - DNA, 57 bp, Homo sapiens; identical to SEQ ID NO: 457128
  chr7:50560501-50560558
  hypo
  pancreas_gallbladder vs. renal

SEQ ID NO: 475132 - DNA, 220 bp, Homo sapiens; identical to SEQ ID NO: 345911
  chr7:50560663-50560883
  hypo
  pancreas_gallbladder vs. renal

SEQ ID NO: 475133 - DNA, 24 bp, Homo sapiens
  chr7:55145822-55145846
  hypo
  pancreas_gallbladder vs. head_and_neck,lung, bladder_and_urothelial
cgtgccgtgttcctgtcctggggt

SEQ ID NO: 475134 - DNA, 619 bp, Homo sapiens; identical to SEQ ID NO: 353990
  chr7:55145980-55146599
  hypo
  pancreas_gallbladder vs. head_and_neck,lung, bladder_and_urothelial

SEQ ID NO: 475135 - DNA, 5 bp, Homo sapiens
  chr7:64974264-64974269
  hypo
  pancreas_gallbladder vs. breast,sarcoma
cggcg

SEQ ID NO: 475136 - DNA, 61 bp, Homo sapiens; identical to SEQ ID NO: 458263
  chr7:64974448-64974509
  hypo
  pancreas_gallbladder vs. breast,sarcoma

SEQ ID NO: 475137 - DNA, 5 bp, Homo sapiens
  chr7:64974988-64974993
  hypo
  pancreas_gallbladder vs. breast,sarcoma
tcggc

SEQ ID NO: 475138 - DNA, 130 bp, Homo sapiens; identical to SEQ ID NO: 459841
  chr7:69064053-69064183
  hypo
  pancreas_gallbladder vs. lung,breast,ovary,renal

SEQ ID NO: 475139 - DNA, 164 bp, Homo sapiens; identical to SEQ ID NO: 463879
  chr7:77324199-77324363
  hypo

SEQ ID NO: 475140 - DNA, 1 bp, Homo sapiens
  chr7:87257895-87257896
  hypo
  pancreas_gallbladder vs. liver_bileduct
c

SEQ ID NO: 475141 - DNA, 45 bp, Homo sapiens; identical to SEQ ID NO: 346914
  chr7:87258398-87258443
  hypo
  pancreas_gallbladder vs. liver_bileduct

SEQ ID NO: 475142 - DNA, 15 bp, Homo sapiens
  chr7:99156600-99156615
  hypo
  pancreas_gallbladder vs. liver_bileduct
ccgccgtcaggagcc

SEQ ID NO: 475143 - DNA, 70 bp, Homo sapiens; identical to SEQ ID NO: 364451
  chr7:99723240-99723310
  hypo

SEQ ID NO: 475144 - DNA, 117 bp, Homo sapiens; identical to SEQ ID NO: 454016
  chr7:101475674-101475791
  hypo
  pancreas_gallbladder vs. colorectal,liver_bileduct

SEQ ID NO: 475145 - DNA, 236 bp, Homo sapiens; identical to SEQ ID NO: 354028
  chr7:101475858-101476094
  hypo
  pancreas_gallbladder vs. colorectal,liver_bileduct

SEQ ID NO: 475146 - DNA, 82 bp, Homo sapiens; identical to SEQ ID NO: 460499
  chr7:101627660-101627742
  hypo
  pancreas_gallbladder vs. liver_bileduct

SEQ ID NO: 475147 - DNA, 282 bp, Homo sapiens; identical to SEQ ID NO: 354034
  chr7:101627846-101628128
  hypo
  pancreas_gallbladder vs. liver_bileduct

SEQ ID NO: 475148 - DNA, 20 bp, Homo sapiens
  chr7:106684813-106684833
  hypo
  pancreas_gallbladder vs. lung,bladder_and_urothelial
cgggggttcaccatggcgaa

SEQ ID NO: 475149 - DNA, 252 bp, Homo sapiens; identical to SEQ ID NO: 463034
  chr7:106684920-106685172
  hypo
  pancreas_gallbladder vs. lung,bladder_and_urothelial

SEQ ID NO: 475150 - DNA, 24 bp, Homo sapiens
  chr7:108095249-108095273
  hypo
  pancreas_gallbladder vs. ovary
cgaggaagagcccagtctcttaga

SEQ ID NO: 475151 - DNA, 408 bp, Homo sapiens; identical to SEQ ID NO: 467694
  chr7:113726962-113727370
  hypo
  pancreas_gallbladder vs. lung,head_and_neck,anorectal

SEQ ID NO: 475152 - DNA, 209 bp, Homo sapiens; identical to SEQ ID NO: 474368
  chr7:127671450-127671659
  hypo
  pancreas_gallbladder vs. cervical,lung

SEQ ID NO: 475153 - DNA, 1 bp, Homo sapiens
  chr7:155581242-155581243
  hypo
  pancreas_gallbladder vs. lymphoid_neoplasm,prostate
c

SEQ ID NO: 475154 - DNA, 39 bp, Homo sapiens; identical to SEQ ID NO: 345928
  chr7:155581980-155582019
  hypo
  pancreas_gallbladder vs. lymphoid_neoplasm,prostate

SEQ ID NO: 475155 - DNA, 42 bp, Homo sapiens; identical to SEQ ID NO: 455419
  chr7:157262486-157262528
  hypo
  pancreas_gallbladder vs. lymphoid_neoplasm

SEQ ID NO: 475156 - DNA, 215 bp, Homo sapiens; identical to SEQ ID NO: 354106
  chr7:157263471-157263686
  hypo
  pancreas_gallbladder vs. lymphoid_neoplasm

SEQ ID NO: 475157 - DNA, 3 bp, Homo sapiens
  chr7:157346741-157346744
  hypo
  pancreas_gallbladder vs. lymphoid_neoplasm
cgc

SEQ ID NO: 475158 - DNA, 476 bp, Homo sapiens; identical to SEQ ID NO: 463898
  chr7:157347322-157347798
  hypo
  pancreas_gallbladder vs. head_and_neck, bladder_and_urothelial,cervical,lymphoid_neoplasm,lung

SEQ ID NO: 475159 - DNA, 9 bp, Homo sapiens
  chr7:157347844-157347853
  hypo
  pancreas_gallbladder vs. head_and_neck, bladder_and_urothelial,cervical,lymphoid_neoplasm,lung
taccatccc

SEQ ID NO: 475160 - DNA, 43 bp, Homo sapiens; identical to SEQ ID NO: 467720
  chr8:495481-495524
  hypo
  pancreas_gallbladder vs. liver_bileduct,lung

SEQ ID NO: 475161 - DNA, 69 bp, Homo sapiens; identical to SEQ ID NO: 467721
  chr8:495635-495704
  hypo
  pancreas_gallbladder vs. liver_bileduct,lung

SEQ ID NO: 475162 - DNA, 111 bp, Homo sapiens
  chr8:8560686-8560797
  hypo
  pancreas_gallbladder vs. head_and_neck,colorectal, cervical,renal,bladder_and_urothelial
cggtggacgtcctcgacggggaggggtgggagtcccaggacgctccctcgtgcagcacccacccctgcgacagctcgctgccctgcgactccgacctctagacgcttgtag

SEQ ID NO: 475163 - DNA, 42 bp, Homo sapiens; identical to SEQ ID NO: 354151
  chr8:8561032-8561074
  hypo
  pancreas_gallbladder vs. head_and_neck,colorectal, cervical,renal,bladder_and_urothelial

SEQ ID NO: 475164 - DNA, 92 bp, Homo sapiens; identical to SEQ ID NO: 378531
  chr8:23399632-23399724
  hypo
  pancreas_gallbladder vs. colorectal

SEQ ID NO: 475165 - DNA, 106 bp, Homo sapiens; identical to SEQ ID NO: 339867
  chr8:26267649-26267755
  hypo
  pancreas_gallbladder vs. lymphoid_neoplasm

SEQ ID NO: 475166 - DNA, 227 bp, Homo sapiens; identical to SEQ ID NO: 474394
  chr8:38326050-38326277
  hypo

SEQ ID NO: 475167 - DNA, 294 bp, Homo sapiens
  chr8:42333256-42333550
  hypo
  pancreas_gallbladder vs. colorectal,lung,upper_gi, uterine
cgaccacattggatacaaggcaagcagaaacatggaggatgagtcaggagcccgctgcatggcttaggcatgagatgaggcatccgggaccaggctgtggacggtggtgggtgggagggaatacgatgatttaagagaactgcagcggcaaaatccaacaggaccagatggtggattaaacatgggggtggagagaggatacatggtttatggaaccgaagtgaaaaataaccgagtgggtttttcttctcttttgcattgtttttagttttgctttttggggctaggatgggg

SEQ ID NO: 475168 - DNA, 410 bp, Homo sapiens; identical to SEQ ID NO: 339898
  chr8:48292766-48293176
  hypo
  pancreas_gallbladder vs. lymphoid_neoplasm

SEQ ID NO: 475169 - DNA, 6 bp, Homo sapiens
  chr8:55372563-55372569
  hypo
  pancreas_gallbladder vs. ovary
tgatcc

SEQ ID NO: 475170 - DNA, 117 bp, Homo sapiens; identical to SEQ ID NO: 453446
  chr8:56014011-56014128
  hypo
  pancreas_gallbladder vs. lung,melanoma,head_and_neck

SEQ ID NO: 475171 - DNA, 117 bp, Homo sapiens; identical to SEQ ID NO: 453446
  chr8:56014011-56014128
  hypo
  pancreas_gallbladder vs. melanoma,lung,head_and_neck, sarcoma

SEQ ID NO: 475172 - DNA, 267 bp, Homo sapiens; identical to SEQ ID NO: 350760
  chr8:65494311-65494578
  hypo
  pancreas_gallbladder vs. sarcoma,lung,anorectal

SEQ ID NO: 475173 - DNA, 32 bp, Homo sapiens
  chr8:71017208-71017240
  hypo
  pancreas_gallbladder vs. liver_bileduct
cgtgagccaccgcgcccagatgatttggcttc

SEQ ID NO: 475174 - DNA, 55 bp, Homo sapiens; identical to SEQ ID NO: 346990
  chr8:72756949-72757004
  hypo
  pancreas_gallbladder vs. sarcoma

SEQ ID NO: 475175 - DNA, 181 bp, Homo sapiens; identical to SEQ ID NO: 459870
  chr8:73449197-73449378
  hypo
  pancreas_gallbladder vs. head_and_neck

SEQ ID NO: 475176 - DNA, 208 bp, Homo sapiens; identical to SEQ ID NO: 459871
  chr8:73449432-73449640
  hypo
  pancreas_gallbladder vs. head_and_neck

SEQ ID NO: 475177 - DNA, 19 bp, Homo sapiens
  chr8:73450162-73450181
  hypo
  pancreas_gallbladder vs. head_and_neck
tttaagaatgaatcatcgc

SEQ ID NO: 475178 - DNA, 27 bp, Homo sapiens
  chr8:75896528-75896555
  hypo
  pancreas_gallbladder vs. lung,sarcoma
cgggcttgggtctcgggagcccaaagc

SEQ ID NO: 475179 - DNA, 99 bp, Homo sapiens; identical to SEQ ID NO: 345308
  chr8:82193698-82193797
  hypo
  pancreas_gallbladder vs. upper_gi

SEQ ID NO: 475180 - DNA, 430 bp, Homo sapiens; identical to SEQ ID NO: 463072
  chr8:104511554-104511984
  hypo
  pancreas_gallbladder vs. head_and_neck

SEQ ID NO: 475181 - DNA, 18 bp, Homo sapiens
  chr8:104511966-104511984
  hypo
  pancreas_gallbladder vs. head_and_neck,sarcoma
cgctcagtctctcctccc

SEQ ID NO: 475182 - DNA, 226 bp, Homo sapiens; identical to SEQ ID NO: 474420
  chr8:109799189-109799415
  hypo
  pancreas_gallbladder vs. anorectal,ovary,uterine,lung, liver_bileduct,head_and_neck

SEQ ID NO: 475183 - DNA, 42 bp, Homo sapiens; identical to SEQ ID NO: 350816
  chr8:109799903-109799945
  hypo
  pancreas_gallbladder vs. anorectal,ovary,uterine,lung, liver_bileduct,head_and_neck

SEQ ID NO: 475184 - DNA, 541 bp, Homo sapiens; identical to SEQ ID NO: 454513
  chr8:121823361-121823902
  hypo
  pancreas_gallbladder vs. liver_bileduct

SEQ ID NO: 475185 - DNA, 27 bp, Homo sapiens
  chr8:121823930-121823957
  hypo
  pancreas_gallbladder vs. liver_bileduct
ctcgctgctcagaaccagggcgtcctc

SEQ ID NO: 475186 - DNA, 44 bp, Homo sapiens; identical to SEQ ID NO: 454049
  chr8:126044399-126044443
  hypo
  pancreas_gallbladder vs. colorectal,upper_gi

SEQ ID NO: 475187 - DNA, 30 bp, Homo sapiens; identical to SEQ ID NO: 454050
  chr8:126044563-126044593
  hypo
  pancreas_gallbladder vs. colorectal,upper_gi

SEQ ID NO: 475188 - DNA, 12 bp, Homo sapiens
  chr8:133492249-133492261
  hypo
  pancreas_gallbladder vs. anorectal,renal
cgcgtgctgagg

SEQ ID NO: 475189 - DNA, 311 bp, Homo sapiens; identical to SEQ ID NO: 474427
  chr8:133493185-133493496
  hypo
  pancreas_gallbladder vs. lung,renal

SEQ ID NO: 475190 - DNA, 840 bp, Homo sapiens; identical to SEQ ID NO: 340074
  chr8:142240180-142241020
  hypo
  pancreas_gallbladder vs. cervical,lung,lymphoid_neoplasm

SEQ ID NO: 475191 - DNA, 121 bp, Homo sapiens; identical to SEQ ID NO: 458331
  chr8:143531858-143531979
  hypo
  pancreas_gallbladder vs. anorectal,lung

SEQ ID NO: 475192 - DNA, 102 bp, Homo sapiens; identical to SEQ ID NO: 474429
  chr8:144512372-144512474
  hypo
  pancreas_gallbladder vs. anorectal

SEQ ID NO: 475193 - DNA, 7 bp, Homo sapiens
  chr8:144512503-144512510
  hypo
  pancreas_gallbladder vs. anorectal
cgaagtc

SEQ ID NO: 475194 - DNA, 173 bp, Homo sapiens; identical to SEQ ID NO: 378795
  chr8:144656945-144657118
  hypo
  pancreas_gallbladder vs. upper_gi

SEQ ID NO: 475195 - DNA, 214 bp, Homo sapiens; identical to SEQ ID NO: 354295
  chr8:144658291-144658505
  hypo
  pancreas_gallbladder vs. liver_bileduct

SEQ ID NO: 475196 - DNA, 242 bp, Homo sapiens; identical to SEQ ID NO: 464831
  chr9:37035886-37036128
  hypo
  pancreas_gallbladder vs. upper_gi

SEQ ID NO: 475197 - DNA, 3 bp, Homo sapiens
  chr9:66494093-66494096
  hypo
  pancreas_gallbladder vs. bladder_and_urothelial,breast, lymphoid_neoplasm,ovary,lung,multiple_myeloma
cgc

SEQ ID NO: 475198 - DNA, 166 bp, Homo sapiens
  chr9:131821444-131821610
  hypo
  pancreas_gallbladder vs. head_and_neck
cggaaggagtttgcagagaagctggagtccctgctgcaccgtgcctaccacctgcaggaggagttcggctccaccttccccgcagacagcatgctgctagacctcggtgagctgggcccagtgcaggtggggtgggcgtggagggtggcagggatggaggtgagga

SEQ ID NO: 475199 - DNA, 41 bp, Homo sapiens; identical to SEQ ID NO: 365067
  chr9:131821644-131821685
  hypo
  pancreas_gallbladder vs. head_and_neck

SEQ ID NO: 475200 - DNA, 426 bp, Homo sapiens; identical to SEQ ID NO: 340405
  chr9:137017050-137017476
  hypo
  pancreas_gallbladder vs. upper_gi

SEQ ID NO: 475201 - DNA, 99 bp, Homo sapiens; identical to SEQ ID NO: 454065
  chr9:138743599-138743698
  hypo
  pancreas_gallbladder vs. liver_bileduct

SEQ ID NO: 475202 - DNA, 142 bp, Homo sapiens; identical to SEQ ID NO: 340426
  chr9:138774077-138774219
  hypo

SEQ ID NO: 475203 - DNA, 292 bp, Homo sapiens; identical to SEQ ID NO: 460563
  chr9:139506149-139506441
  hypo
  pancreas_gallbladder vs. liver_bileduct

SEQ ID NO: 475204 - DNA, 30 bp, Homo sapiens; identical to SEQ ID NO: 460564
  chr9:139506516-139506546
  hypo
  pancreas_gallbladder vs. liver_bileduct

SEQ ID NO: 475205 - DNA, 43 bp, Homo sapiens; identical to SEQ ID NO: 462181
  chr9:139809677-139809720
  hypo
  pancreas_gallbladder vs. melanoma,renal,breast,cervical, prostate,ovary,upper_gi,lymphoid_neoplasm,uterine

SEQ ID NO: 475206 - DNA, 84 bp, Homo sapiens
  chr9:140107955-140108039
  hypo
  pancreas_gallbladder vs. colorectal
cgaggccgcctgctcccacccacacaggctcattctctgcgagcagaggacctgctgcttggcaccctggcagctgccctggtc

SEQ ID NO: 475207 - DNA, 180 bp, Homo sapiens; identical to SEQ ID NO: 348399
  chr9:140108461-140108641
  hypo
  pancreas_gallbladder vs. colorectal

SEQ ID NO: 475208 - DNA, 184 bp, Homo sapiens; identical to SEQ ID NO: 465859
  chr9:140400692-140400876
  hypo

SEQ ID NO: 475209 - DNA, 517 bp, Homo sapiens; identical to SEQ ID NO: 465860
  chr9:140400905-140401422
  hypo

SEQ ID NO: 475210 - DNA, 2 bp, Homo sapiens
  chr9:140401590-140401592
  hypo
ac

SEQ ID NO: 475211 - DNA, 69 bp, Homo sapiens; identical to SEQ ID NO: 460571
  chr9:140682727-140682796
  hypo
  pancreas_gallbladder vs. lung,head_and_neck,cervical

SEQ ID NO: 475212 - DNA, 175 bp, Homo sapiens; identical to SEQ ID NO: 365205
  chr9:140682922-140683097
  hypo
  pancreas_gallbladder vs. lung,head_and_neck,cervical

SEQ ID NO: 475213 - DNA, 949 bp, Homo sapiens; identical to SEQ ID NO: 454530
  chrY:16636193-16637142
  hypo
  pancreas_gallbladder vs. liver_bileduct

SEQ ID NO: 475214 - DNA, 28 bp, Homo sapiens
  chr1:1935038-1935066
  hyper
  prostate vs. sarcoma
cgggaaaggcgtttcatatgggacggag

SEQ ID NO: 475215 - DNA, 195 bp, Homo sapiens; identical to SEQ ID NO: 468533
  chr1:2460612-2460807
  hyper
  prostate vs. bladder_and_urothelial,myeloid_neoplasm, thyroid,non_cancer,ovary,uterine,head_and_neck,multiple_myeloma, colorectal,lung,sarcoma,breast,anorectal,pancreas_gallbladder

SEQ ID NO: 475216 - DNA, 414 bp, Homo sapiens; identical to SEQ ID NO: 468534
  chr1:2460898-2461312
  hyper
  prostate vs. bladder_and_urothelial,myeloid_neoplasm, thyroid,non_cancer,ovary,uterine,head_and_neck,multiple_myeloma, colorectal,lung,sarcoma,breast,anorectal,pancreas_gallbladder

SEQ ID NO: 475217 - DNA, 288 bp, Homo sapiens; identical to SEQ ID NO: 468535
  chr1:2461024-2461312
  hyper
  prostate vs. myeloid_neoplasm,anorectal,non_cancer, colorectal,uterine,bladder_and_urothelial,ovary,thyroid, pancreas_gallbladder,head_and_neck,sarcoma,multiple_myeloma, cervical,lung

SEQ ID NO: 475218 - DNA, 21 bp, Homo sapiens
  chr1:2461988-2462009
  hyper
  prostate vs. myeloid_neoplasm,anorectal,non_cancer, colorectal,uterine,bladder_and_urothelial,ovary,thyroid, pancreas_gallbladder,head_and_neck,sarcoma,multiple_myeloma, cervical,lung
ccttttcccaggccgccaaac

SEQ ID NO: 475219 - DNA, 443 bp, Homo sapiens; identical to SEQ ID NO: 344934
  chr1:2461988-2462431
  hyper
  prostate vs. colorectal,cervical,anorectal,ovary, myeloid_neoplasm,bladder_and_urothelial,non_cancer,uterine, pancreas_gallbladder,head_and_neck,thyroid,multiple_myeloma

SEQ ID NO: 475220 - DNA, 227 bp, Homo sapiens; identical to SEQ ID NO: 330672
  chr1:6474528-6474755
  hyper
  prostate vs. head_and_neck,breast,ovary, pancreas_gallbladder,bladder_and_urothelial,upper_gi, multiple_myeloma,colorectal,cervical,uterine,non_cancer, anorectal,lymphoid_neoplasm,myeloid_neoplasm,thyroid,lung

SEQ ID NO: 475221 - DNA, 220 bp, Homo sapiens; identical to SEQ ID NO: 455498
  chr1:6479997-6480217
  hyper
  prostate vs. anorectal,myeloid_neoplasm

SEQ ID NO: 475222 - DNA, 517 bp, Homo sapiens; identical to SEQ ID NO: 455503
  chr1:12226892-12227409
  hyper
  prostate vs. colorectal,myeloid_neoplasm

SEQ ID NO: 475223 - DNA, 207 bp, Homo sapiens; identical to SEQ ID NO: 455504
  chr1:12227438-12227645
  hyper
  prostate vs. colorectal,myeloid_neoplasm

SEQ ID NO: 475224 - DNA, 247 bp, Homo sapiens; identical to SEQ ID NO: 455505
  chr1:12227162-12227409
  hyper
  prostate vs. multiple_myeloma,anorectal,colorectal, non_cancer

SEQ ID NO: 475225 - DNA, 207 bp, Homo sapiens; identical to SEQ ID NO: 455504
  chr1:12227438-12227645
  hyper
  prostate vs. multiple_myeloma,anorectal,colorectal, non_cancer

SEQ ID NO: 475226 - DNA, 307 bp, Homo sapiens; identical to SEQ ID NO: 369028
  chr1:19283560-19283867
  hyper
  prostate vs. ovary

SEQ ID NO: 475227 - DNA, 201 bp, Homo sapiens; identical to SEQ ID NO: 344942
  chr1:20512799-20513000
  hyper
  prostate vs. liver_bileduct,ovary,breast,uterine, bladder_and_urothelial,myeloid_neoplasm,non_cancer, multiple_myeloma,upper_gi

SEQ ID NO: 475228 - DNA, 5 bp, Homo sapiens
  chr1:24648226-24648231
  hyper
  prostate vs. cervical,anorectal,breast,myeloid_neoplasm, bladder_and_urothelial,non_cancer,multiple_myeloma, lymphoid_neoplasm
cgggt

SEQ ID NO: 475229 - DNA, 491 bp, Homo sapiens
  chr1:24648342-24648833
  hyper
  prostate vs. cervical,anorectal,breast,myeloid_neoplasm, bladder_and_urothelial,non_cancer,multiple_myeloma, lymphoid_neoplasm
gtcgcagcgctctgggtgcctggagcccgcagccctgggcagccccgggctaccgcagggcgcaagggatcctgggctgcggccgagggcgccggaagtcgccgccgaccgcctgggtctcgcaggaaaacagccggcgcccgcgagctgcccagcgtcgggttttcctgaaggtgcgtcggggcccccggggagctggagccgcaggcgacctccccggtgacctgttgttcccctctggagggccggccggcgctccaggcaggccccgttgacagcccaggaagggagagtttcgccgcaaaggggcttggcacacagtaggtctaaggcaccgaggcaggagcgtcccccgcggcctcgctccctgctctctgggccccaccgctgccgcctggagtctcccctcagcctcgcagagacgcgactcggttgggggaaggggactagaaccgtcgcagtcctgaccgcggccgccgccgccgttctat

SEQ ID NO: 475230 - DNA, 66 bp, Homo sapiens
  chr1:27113559-27113625
  hyper
  prostate vs. bladder_and_urothelial
cggcccctggcttcgtttggagggcagataactgaaaccacataaggctttggaatcctgagaaac

SEQ ID NO: 475231 - DNA, 530 bp, Homo sapiens; identical to SEQ ID NO: 356707
  chr1:27113714-27114244
  hyper
  prostate vs. bladder_and_urothelial

SEQ ID NO: 475232 - DNA, 135 bp, Homo sapiens
  chr1:28198925-28199060
  hyper
  prostate vs. ovary,uterine
cggggggcggggcttcggcggggcggggctgcagggctcccgcgggctggcggggcggcttcggcgtgcggggcggggcatcggcggggcggggctgcagggctcccggggaccgcccgcccgcccctcagtctg

SEQ ID NO: 475233 - DNA, 130 bp, Homo sapiens; identical to SEQ ID NO: 454093
  chr1:32410105-32410235
  hyper
  prostate vs. colorectal,myeloid_neoplasm,thyroid, non_cancer,sarcoma,upper_gi

SEQ ID NO: 475234 - DNA, 393 bp, Homo sapiens; identical to SEQ ID NO: 330757
  chr1:33937934-33938327
  hyper
  prostate vs. lung,upper_gi,breast,bladder_and_urothelial, ovary,renal,colorectal,uterine,melanoma,multiple_myeloma, sarcoma,pancreas_gallbladder,head_and_neck,cervical,anorectal, liver_bileduct,non_cancer,thyroid

SEQ ID NO: 475235 - DNA, 102 bp, Homo sapiens
  chr1:40781107-40781209
  hyper
  prostate vs. non_cancer,myeloid_neoplasm,thyroid, multiple_myeloma,ovary,head_and_neck,uterine
cggcgtccttgtggtgcgggccggcgccgcctattggcgacgaggggcactacatctccgggcaccccgaagtccccacccccaccacagcgctcacaaagt

SEQ ID NO: 475236 - DNA, 39 bp, Homo sapiens
  chr1:41326952-41326991
  hyper
  prostate vs. upper_gi
cgagggggagaggacacgatccaagaaccagagtccgaa

SEQ ID NO: 475237 - DNA, 435 bp, Homo sapiens
  chr1:41327080-41327515
  hyper
  prostate vs. upper_gi
ctggagggacgccagggtcccagtccggtgccgggccctgcgcacacagccgccgcctccaccctcgcggagggcgcgcgcggggcccagtcgctgggtgcagggtccggcgggcagtcgggccctttctcctctccggcacgccgggcgggcgccggccgccctcagcagctcacggagccggcgggcggcgcggaccccaagtccgagaagcagtcgaactcgctctggcccaggaagagctcgggcagctcgcgcacgcggtgcagcccgagctccagctccagcgacgtcagcgcctcctcgtcgatgagttcggcgtccatgccgcccagggcgtgcgcgggcggcggcggggctgcggcgcttggcgccggctgcgggcccggggggcctcccggagcgttggggggcgcggccgcgcggccggggtac

SEQ ID NO: 475238 - DNA, 317 bp, Homo sapiens; identical to SEQ ID NO: 330795
  chr1:45284969-45285286
  hyper
  prostate vs. pancreas_gallbladder,upper_gi

SEQ ID NO: 475239 - DNA, 784 bp, Homo sapiens; identical to SEQ ID NO: 330796
  chr1:45285419-45286203
  hyper
  prostate vs. colorectal,upper_gi,uterine

SEQ ID NO: 475240 - DNA, 335 bp, Homo sapiens; identical to SEQ ID NO: 330799
  chr1:46908450-46908785
  hyper
  prostate vs. head_and_neck

SEQ ID NO: 475241 - DNA, 189 bp, Homo sapiens; identical to SEQ ID NO: 468568
  chr1:46954676-46954865
  hyper
  prostate vs. colorectal,pancreas_gallbladder

SEQ ID NO: 475242 - DNA, 392 bp, Homo sapiens; identical to SEQ ID NO: 349231
  chr1:46954904-46955296
  hyper
  prostate vs. colorectal,pancreas_gallbladder

SEQ ID NO: 475243 - DNA, 836 bp, Homo sapiens; identical to SEQ ID NO: 330816
  chr1:48937304-48938140
  hyper
  prostate vs. breast,sarcoma,renal,bladder_and_urothelial, pancreas_gallbladder,colorectal,lung,ovary,melanoma

SEQ ID NO: 475244 - DNA, 32 bp, Homo sapiens; identical to SEQ ID NO: 455525
  chr1:52194847-52194879
  hyper
  prostate vs. pancreas_gallbladder,bladder_and_urothelial

SEQ ID NO: 475245 - DNA, 323 bp, Homo sapiens; identical to SEQ ID NO: 455526
  chr1:52194968-52195291
  hyper
  prostate vs. pancreas_gallbladder,bladder_and_urothelial

SEQ ID NO: 475246 - DNA, 387 bp, Homo sapiens; identical to SEQ ID NO: 455527
  chr1:52195348-52195735
  hyper
  prostate vs. pancreas_gallbladder,bladder_and_urothelial

SEQ ID NO: 475247 - DNA, 64 bp, Homo sapiens; identical to SEQ ID NO: 470928
  chr1:59612305-59612369
  hyper
  prostate vs. bladder_and_urothelial,thyroid,non_cancer, cervical,pancreas_gallbladder,renal,multiple_myeloma,upper_gi

SEQ ID NO: 475248 - DNA, 293 bp, Homo sapiens; identical to SEQ ID NO: 330855
  chr1:65431047-65431340
  hyper
  prostate vs. bladder_and_urothelial,liver_bileduct,ovary, colorectal,pancreas_gallbladder,upper_gi,multiple_myeloma, uterine,non_cancer

SEQ ID NO: 475249 - DNA, 41 bp, Homo sapiens; identical to SEQ ID NO: 468571
  chr1:65468262-65468303
  hyper
  prostate vs. breast,anorectal,lymphoid_neoplasm, multiple_myeloma

SEQ ID NO: 475250 - DNA, 155 bp, Homo sapiens; identical to SEQ ID NO: 197574
  chr1:65468660-65468815
  hyper
  prostate vs. breast,anorectal,lymphoid_neoplasm, multiple_myeloma

SEQ ID NO: 475251 - DNA, 179 bp, Homo sapiens; identical to SEQ ID NO: 468573
  chr1:65468817-65468996
  hyper
  prostate vs. breast,anorectal,lymphoid_neoplasm, multiple_myeloma

SEQ ID NO: 475252 - DNA, 45 bp, Homo sapiens; identical to SEQ ID NO: 468576
  chr1:70035044-70035089
  hyper
  prostate vs. bladder_and_urothelial

SEQ ID NO: 475253 - DNA, 92 bp, Homo sapiens; identical to SEQ ID NO: 356800
  chr1:70035537-70035629
  hyper
  prostate vs. bladder_and_urothelial

SEQ ID NO: 475254 - DNA, 438 bp, Homo sapiens; identical to SEQ ID NO: 464043
  chr1:90308855-90309293
  hyper
  prostate vs. melanoma,multiple_myeloma,sarcoma,anorectal, cervical

SEQ ID NO: 475255 - DNA, 115 bp, Homo sapiens; identical to SEQ ID NO: 344961
  chr1:90309490-90309605
  hyper
  prostate vs. melanoma,multiple_myeloma,sarcoma,anorectal, cervical

SEQ ID NO: 475256 - DNA, 306 bp, Homo sapiens; identical to SEQ ID NO: 452735
  chr1:108506290-108506596
  hyper
  prostate vs. multiple_myeloma

SEQ ID NO: 475257 - DNA, 66 bp, Homo sapiens; identical to SEQ ID NO: 455550
  chr1:110672768-110672834
  hyper
  prostate vs. multiple_myeloma

SEQ ID NO: 475258 - DNA, 818 bp, Homo sapiens; identical to SEQ ID NO: 330937
  chr1:113498720-113499538
  hyper
  prostate vs. upper_gi

SEQ ID NO: 475259 - DNA, 47 bp, Homo sapiens; identical to SEQ ID NO: 349313
  chr1:116711292-116711339
  hyper
  prostate vs. thyroid,sarcoma,multiple_myeloma, myeloid_neoplasm,cervical,non_cancer,renal

SEQ ID NO: 475260 - DNA, 26 bp, Homo sapiens
  chr1:151693837-151693863
  hyper
  prostate vs. myeloid_neoplasm,non_cancer
cgggaaaggcgatcctttagagaccc

SEQ ID NO: 475261 - DNA, 79 bp, Homo sapiens; identical to SEQ ID NO: 197752
  chr1:151694406-151694485
  hyper
  prostate vs. myeloid_neoplasm,non_cancer

SEQ ID NO: 475262 - DNA, 1 bp, Homo sapiens
  chr1:154971620-154971621
  hyper
  prostate vs. pancreas_gallbladder,breast, multiple_myeloma,ovary
c

SEQ ID NO: 475263 - DNA, 216 bp, Homo sapiens; identical to SEQ ID NO: 278869
  chr1:154971706-154971922
  hyper
  prostate vs. pancreas_gallbladder,breast, multiple_myeloma,ovary

SEQ ID NO: 475264 - DNA, 456 bp, Homo sapiens
  chr1:154971924-154972380
  hyper
  prostate vs. pancreas_gallbladder,breast, multiple_myeloma,ovary
ctccaacccagaggcccggaataggcgcggagttataaatagtgccacccgcaggtgttggggggagtcggcgggaggggggtacccctggcggccacggccccttcaggtgggttgggcggtcgcggtgggagcgctggggggcggggggcgtggggggtctgcggtctgagcgcccccagcggtttcctgggcggcgggtttttcgagggaagcggaggcagcggaggatgggggggagcagcggagaagaggtgggcgcctggcgcatgctgacgctccgcttgcagctcagccccccacattccgaaacaggcccccagacccactcacgcaggaccccgcccaggcaaagcctcgcctttcttaacacctgaaggcctcattcccccaggttctgcaagcatctaacttctatgcttctacccttcggcgcacgtggcccggccagtccgc

SEQ ID NO: 475265 - DNA, 916 bp, Homo sapiens; identical to SEQ ID NO: 356900
  chr1:159894399-159895315
  hyper
  prostate vs. upper_gi,head_and_neck

SEQ ID NO: 475266 - DNA, 640 bp, Homo sapiens; identical to SEQ ID NO: 331044
  chr1:181059009-181059649
  hyper
  prostate vs. upper_gi,head_and_neck,breast, bladder_and_urothelial

SEQ ID NO: 475267 - DNA, 311 bp, Homo sapiens; identical to SEQ ID NO: 356969
  chr1:201228906-201229217
  hyper
  prostate vs. pancreas_gallbladder

SEQ ID NO: 475268 - DNA, 382 bp, Homo sapiens; identical to SEQ ID NO: 331080
  chr1:203595808-203596190
  hyper
  prostate vs. upper_gi

SEQ ID NO: 475269 - DNA, 85 bp, Homo sapiens
  chr1:228225442-228225527
  hyper
  prostate vs. cervical
cggccgactccccgccgcgtccggctgggagcacaatatcccagcgacggcgacaagattaagcacaaggggagagtgcaaatgc

SEQ ID NO: 475270 - DNA, 62 bp, Homo sapiens; identical to SEQ ID NO: 357033
  chr1:228225939-228226001
  hyper
  prostate vs. cervical

SEQ ID NO: 475271 - DNA, 225 bp, Homo sapiens; identical to SEQ ID NO: 333849
  chr10:1651074-1651299
  hyper
  prostate vs. melanoma

SEQ ID NO: 475272 - DNA, 125 bp, Homo sapiens
  chr10:12390701-12390826
  hyper
  prostate vs. multiple_myeloma,non_cancer,cervical, myeloid_neoplasm,thyroid
cgaggggactgcggggcagacgatcacttctttccactgagtctctgggaggagacagggagatgccagaaggggccaagcgtgagccagggcaaccaggccggccaggcccgccggccgctcca

SEQ ID NO: 475273 - DNA, 681 bp, Homo sapiens
  chr10:12390995-12391676
  hyper
  prostate vs. multiple_myeloma,non_cancer,cervical, myeloid_neoplasm,thyroid
cgaatgagctcccgcccgcctccgcctccatcccagccgccgccgccgcccgtcgccataacaaccggcccccaccccccccaccccacgccttgcccctcgggtcccccgggccacaggccacagcgcgggaaggcgccccgccctcggcgccccgcatccggccgccgcgcacccccgcccgcccggcgcttccgagccacgcagaggcgccccctcccgccggagacgggaaagccccggcgcccccagactgggctccgtttccagctcccggaggggctggggctctcccgcgtgcgccccgcacctgccgggggcccgtacccgccctcgccggggctccagggggcacgacggccgtggcccggcgctcttgggaggggagcgggacatccccgaaggcggcgcgctggaggcggggagcggccggggcgcacggagagggcggggagcccgcgggagggggaggagggggaggagggggaggaggcgcgaggtgggggggagcgcggcgggcggcagggagggagcgggagggaggcaagaaagtagcagaaagtgaggctggcaggcggcggcaaaggagccggcgcgcggcggcggcaggaagtctgtgcccgagaacagcagaaataagagccagggagggaccgcggccgcggcggcggcggcgagagc

SEQ ID NO: 475274 - DNA, 209 bp, Homo sapiens; identical to SEQ ID NO: 452758
  chr10:17270445-17270654
  hyper
  prostate vs. melanoma,sarcoma,uterine,multiple_myeloma, myeloid_neoplasm,non_cancer,ovary

SEQ ID NO: 475275 - DNA, 209 bp, Homo sapiens; identical to SEQ ID NO: 452758
  chr10:17270445-17270654
  hyper
  prostate vs. melanoma,myeloid_neoplasm,uterine,thyroid, non_cancer,renal,multiple_myeloma,sarcoma

SEQ ID NO: 475276 - DNA, 116 bp, Homo sapiens; identical to SEQ ID NO: 345346
  chr10:17272233-17272349
  hyper
  prostate vs. sarcoma

SEQ ID NO: 475277 - DNA, 185 bp, Homo sapiens
  chr10:31422647-31422832
  hyper
  prostate vs. thyroid
cggggagaagggcctcgtgggccagcgcagcttgctcctctgcagacccagaagcatttgtgcgtcccgggcgtggcaggcccggcgcccactccgccctcccgcccctcccccgcgccacgtcacccgggtcacgtgagtgaccaggctcctcaccccaacccccctccctactcccgccagac

SEQ ID NO: 475278 - DNA, 115 bp, Homo sapiens; identical to SEQ ID NO: 359538
  chr10:31423116-31423231
  hyper
  prostate vs. thyroid

SEQ ID NO: 475279 - DNA, 12 bp, Homo sapiens
  chr10:52177724-52177736
  hyper
  prostate vs. bladder_and_urothelial,upper_gi,uterine, breast,renal,cervical,colorectal,non_cancer,lymphoid_neoplasm, head_and_neck,ovary,sarcoma,anorectal,thyroid
cgccgtagtaga

SEQ ID NO: 475280 - DNA, 49 bp, Homo sapiens
  chr10:60026209-60026258
  hyper
  prostate vs. lung,head_and_neck,upper_gi
cgtgacttcaggcacgtcattcttaaccagggttggccttagtcacctc

SEQ ID NO: 475281 - DNA, 1 bp, Homo sapiens
  chr10:60026303-60026304
  hyper
  prostate vs. lung,head_and_neck,upper_gi
c

SEQ ID NO: 475282 - DNA, 147 bp, Homo sapiens; identical to SEQ ID NO: 455589
  chr10:73846836-73846983
  hyper
  prostate vs. non_cancer,myeloid_neoplasm,thyroid

SEQ ID NO: 475283 - DNA, 164 bp, Homo sapiens; identical to SEQ ID NO: 351056
  chr10:73847427-73847591
  hyper
  prostate vs. non_cancer,myeloid_neoplasm,thyroid

SEQ ID NO: 475284 - DNA, 365 bp, Homo sapiens; identical to SEQ ID NO: 359595
  chr10:74020611-74020976
  hyper
  prostate vs. upper_gi,lymphoid_neoplasm

SEQ ID NO: 475285 - DNA, 10 bp, Homo sapiens
  chr10:74020978-74020988
  hyper
  prostate vs. upper_gi,lymphoid_neoplasm
agaccgcggc

SEQ ID NO: 475286 - DNA, 413 bp, Homo sapiens; identical to SEQ ID NO: 468642
  chr10:74079281-74079694
  hyper
  prostate vs. liver_bileduct,lymphoid_neoplasm, pancreas_gallbladder,lung,uterine,upper_gi,multiple_myeloma, breast,bladder_and_urothelial,colorectal,cervical,renal, anorectal,non_cancer,head_and_neck,sarcoma,myeloid_neoplasm,
  CONT. FROM ABOVE: thyroid,ovary

SEQ ID NO: 475287 - DNA, 179 bp, Homo sapiens; identical to SEQ ID NO: 345357
  chr10:74079752-74079931
  hyper
  prostate vs. liver_bileduct,lymphoid_neoplasm, pancreas_gallbladder,lung,uterine,upper_gi,multiple_myeloma, breast,bladder_and_urothelial,colorectal,cervical,renal, anorectal,non_cancer,head_and_neck,sarcoma,myeloid_neoplasm,
  CONT. FROM ABOVE: thyroid,ovary

SEQ ID NO: 475288 - DNA, 42 bp, Homo sapiens
  chr10:88731062-88731104
  hyper
  prostate vs. cervical,sarcoma,lung,colorectal,upper_gi, bladder_and_urothelial,uterine,ovary,head_and_neck,renal
cgctgccgcccggcggggtcccgccccgccactccccgggga

SEQ ID NO: 475289 - DNA, 177 bp, Homo sapiens; identical to SEQ ID NO: 351072
  chr10:88731133-88731310
  hyper
  prostate vs. cervical,sarcoma,lung,colorectal,upper_gi, bladder_and_urothelial,uterine,ovary,head_and_neck,renal

SEQ ID NO: 475290 - DNA, 57 bp, Homo sapiens; identical to SEQ ID NO: 345362
  chr10:93647662-93647719
  hyper
  prostate vs. ovary,anorectal,uterine,non_cancer, myeloid_neoplasm,head_and_neck,cervical

SEQ ID NO: 475291 - DNA, 179 bp, Homo sapiens; identical to SEQ ID NO: 459325
  chr10:94450726-94450905
  hyper
  prostate vs. myeloid_neoplasm

SEQ ID NO: 475292 - DNA, 653 bp, Homo sapiens; identical to SEQ ID NO: 347115
  chr10:102791390-102792043
  hyper
  prostate vs. sarcoma,ovary,colorectal,lung,melanoma, multiple_myeloma,breast,upper_gi,renal,uterine,thyroid, head_and_neck,myeloid_neoplasm,cervical,anorectal, pancreas_gallbladder,non_cancer,bladder_and_urothelial

SEQ ID NO: 475293 - DNA, 113 bp, Homo sapiens
  chr10:102792045-102792158
  hyper
  prostate vs. sarcoma,ovary,colorectal,lung,melanoma, multiple_myeloma,breast,upper_gi,renal,uterine,thyroid, head_and_neck,myeloid_neoplasm,cervical,anorectal, pancreas_gallbladder,non_cancer,bladder_and_urothelial
ctcgaatgacacccaccgccctcaggttctgccaatccccgtgcccaccgggtgggcgcggccgggaagctcctgcccctccctgctggtcggcgtcacgcgtgacgtcccgc

SEQ ID NO: 475294 - DNA, 723 bp, Homo sapiens
  chr10:106097237-106097960
  hyper
  prostate vs. head_and_neck
cggtggctttttttttctttttctttttctttttttaagagaaagcgttttggatggggagtcccgccccgggagtcttcaccaggcggccagaatggcaaagtcacagggatggggttgagggtggggttaggggtgaaggggcagagagttatttgcagcccaagagcaagtctgcacagcgtgaggtctggcccactaatagtcccgaaagaggaagcggcggggattttatccggcctgaagcagccccataacttcactaccatgaaccgagaaaaaaaaacttcacgcctattcctcccttacaggaagggagggaaggggaaggggaaaagggggcagcaaatgagcagggcgaaccggcttttctttcttcggtagcgctctgctcagatgtgagaagtaacgggtcacctggccactaggaacaaaaatgtggtcccgctctgggctccgaggctgcgcgcgcctcgaggaggagctgcccgcagccctggctggagcgagcgcccgggacgcatcccccgacgcggcgggaacaggatgcgggaccgcgaggagacaatacgcccgcctgggcacgcgcgctttaagggaagggggtctccaaagtcagcccccacccgggaggagcaggcgcccgcgctccccacaccctcctgcgccccctctgtcggcagccatctccgacacagctcctccgagctcgcgctctccatc

SEQ ID NO: 475295 - DNA, 165 bp, Homo sapiens; identical to SEQ ID NO: 351101
  chr10:106098025-106098190
  hyper
  prostate vs. head_and_neck

SEQ ID NO: 475296 - DNA, 737 bp, Homo sapiens; identical to SEQ ID NO: 334066
  chr10:111767130-111767867
  hyper
  prostate vs. upper_gi,bladder_and_urothelial, pancreas_gallbladder,multiple_myeloma,ovary,colorectal,melanoma, lung,non_cancer,uterine,cervical,anorectal,thyroid,renal, lymphoid_neoplasm,head_and_neck,sarcoma

SEQ ID NO: 475297 - DNA, 654 bp, Homo sapiens; identical to SEQ ID NO: 334071
  chr10:114708972-114709626
  hyper
  prostate vs. colorectal

SEQ ID NO: 475298 - DNA, 5 bp, Homo sapiens
  chr10:125851161-125851166
  hyper
  prostate vs. ovary,myeloid_neoplasm,anorectal,thyroid
cggag

SEQ ID NO: 475299 - DNA, 82 bp, Homo sapiens; identical to SEQ ID NO: 459338
  chr10:125851929-125852011
  hyper
  prostate vs. ovary,myeloid_neoplasm,anorectal,thyroid

SEQ ID NO: 475300 - DNA, 204 bp, Homo sapiens; identical to SEQ ID NO: 459339
  chr10:125851929-125852133
  hyper
  prostate vs. ovary,breast,head_and_neck,uterine

SEQ ID NO: 475301 - DNA, 129 bp, Homo sapiens; identical to SEQ ID NO: 351149
  chr11:8615887-8616016
  hyper
  prostate vs. ovary

SEQ ID NO: 475302 - DNA, 203 bp, Homo sapiens
  chr11:13300232-13300435
  hyper
  prostate vs. ovary,uterine
cgggcaggtgcgcgtcggcctggggatgtcgcccggagcccgggtgcgggccggccttggagtcccagagctccgcggagggcgcagcgagcctggctccagctccgggtttgacagatgtcagggaagaaaaggttcccgctcggctattgccgggcgttgacatcccagagagcttcccgtttgcttggaagaagacgagg

SEQ ID NO: 475303 - DNA, 108 bp, Homo sapiens; identical to SEQ ID NO: 468669
  chr11:17373019-17373127
  hyper
  prostate vs. ovary,breast,upper_gi

SEQ ID NO: 475304 - DNA, 167 bp, Homo sapiens; identical to SEQ ID NO: 468670
  chr11:17373405-17373572
  hyper
  prostate vs. ovary,breast,upper_gi

SEQ ID NO: 475305 - DNA, 116 bp, Homo sapiens; identical to SEQ ID NO: 7948
  chr11:17373642-17373758
  hyper
  prostate vs. ovary,breast,upper_gi

SEQ ID NO: 475306 - DNA, 126 bp, Homo sapiens; identical to SEQ ID NO: 359788
  chr11:17497697-17497823
  hyper
  prostate vs. bladder_and_urothelial

SEQ ID NO: 475307 - DNA, 929 bp, Homo sapiens; identical to SEQ ID NO: 345384
  chr11:32915113-32916042
  hyper
  prostate vs. lung,lymphoid_neoplasm,liver_bileduct, head_and_neck,breast,pancreas_gallbladder, bladder_and_urothelial,ovary,uterine,renal,upper_gi,melanoma, sarcoma,multiple_myeloma,cervical,colorectal,anorectal,
  CONT. FROM ABOVE: non_cancer,myeloid_neoplasm,thyroid

SEQ ID NO: 475308 - DNA, 20 bp, Homo sapiens
  chr11:35160310-35160330
  hyper
  prostate vs. sarcoma,uterine,ovary,melanoma,breast, colorectal,cervical,upper_gi,pancreas_gallbladder,anorectal, myeloid_neoplasm
cggattcagagaaatttagc

SEQ ID NO: 475309 - DNA, 741 bp, Homo sapiens
  chr11:35160332-35161073
  hyper
  prostate vs. sarcoma,uterine,ovary,melanoma,breast, colorectal,cervical,upper_gi,pancreas_gallbladder,anorectal, myeloid_neoplasm
gaaaggagaggccaaaggctgaacccaatggtgcaaggttttacggttcggtcatcctctgtcctgacgccgcggggccagcgggagaagaaagccagtgcgtctctgggcgcaggggccagtggggctcggaggcacaggcaccccgcgacactccaggttccccgacccacgtccctggcagccccgattatttacagcctcagcagagcacggggcgggggcagaggggcccgcccgggagggctgctacttcttaaaacctctgcgggctgcttagtcacagccccccttgcttgggtgtgtccttcgctcgctccctccctccgtcttaggtcactgttttcaacctcgaataaaaactgcagccaacttccgaggcagcctcattgcccagcggaccccagcctctgccaggttcggtccgccatcctcgtcccgtcctccgccggcccctgccccgcgcccagggatcctccagctcctttcgcccgcgccctccgttcgctccggacaccatggacaagttttggtggcacgcagcctggggactctgcctcgtgccgctgagcctggcgcagatcggtgagtgcccgccgcagcctgggcagcaagatgggtgcggggtgctcagcgcggacccggcggcagcccctccggctgagtcggccctgggggactggagtcaagtgagctgtctgcgaagtgcattgggctccggaaagcagggctgggatttgc

SEQ ID NO: 475310 - DNA, 623 bp, Homo sapiens; identical to SEQ ID NO: 359818
  chr11:35639806-35640429
  hyper
  prostate vs. cervical,ovary

SEQ ID NO: 475311 - DNA, 87 bp, Homo sapiens; identical to SEQ ID NO: 454128
  chr11:47208495-47208582
  hyper
  prostate vs. thyroid,myeloid_neoplasm,non_cancer, multiple_myeloma,uterine

SEQ ID NO: 475312 - DNA, 78 bp, Homo sapiens; identical to SEQ ID NO: 459354
  chr11:57194101-57194179
  hyper
  prostate vs. anorectal

SEQ ID NO: 475313 - DNA, 50 bp, Homo sapiens; identical to SEQ ID NO: 334262
  chr11:57334786-57334836
  hyper
  prostate vs. liver_bileduct

SEQ ID NO: 475314 - DNA, 189 bp, Homo sapiens
  chr11:58940419-58940608
  hyper
  prostate vs. upper_gi,renal,bladder_and_urothelial, head_and_neck,ovary,colorectal,cervical,pancreas_gallbladder, multiple_myeloma,uterine,non_cancer,thyroid,anorectal,breast, lung
cgattcactccgctgaatcctcgcaggatcctccctcccccttaaacatccatgcaaatagtatcagtgttgtggttttgcaaacccagcttcaacctagtcggtaacaatccactccccacccctttcatgcccccgcttttcagcagttggtggccctaagtctttctatgtagaaattctagggcc

SEQ ID NO: 475315 - DNA, 200 bp, Homo sapiens; identical to SEQ ID NO: 202554
  chr11:58940666-58940866
  hyper
  prostate vs. upper_gi,renal,bladder_and_urothelial, head_and_neck,ovary,colorectal,cervical,pancreas_gallbladder, multiple_myeloma,uterine,non_cancer,thyroid,anorectal,breast, lung

SEQ ID NO: 475316 - DNA, 54 bp, Homo sapiens
  chr11:58940868-58940922
  hyper
  prostate vs. upper_gi,renal,bladder_and_urothelial, head_and_neck,ovary,colorectal,cervical,pancreas_gallbladder, multiple_myeloma,uterine,non_cancer,thyroid,anorectal,breast, lung
gctccctgggaggagagactagggctggggtaccctggacgccgcggcattggc

SEQ ID NO: 475317 - DNA, 28 bp, Homo sapiens
  chr11:61334808-61334836
  hyper
  prostate vs. colorectal,ovary
cgccccgccccccagagctgtccaaggt

SEQ ID NO: 475318 - DNA, 19 bp, Homo sapiens
  chr11:61335353-61335372
  hyper
  prostate vs. colorectal,ovary
gtctgactgcatcctggcc

SEQ ID NO: 475319 - DNA, 34 bp, Homo sapiens; identical to SEQ ID NO: 359849
  chr11:61596695-61596729
  hyper
  prostate vs. sarcoma,myeloid_neoplasm

SEQ ID NO: 475320 - DNA, 199 bp, Homo sapiens; identical to SEQ ID NO: 334282
  chr11:63828227-63828426
  hyper
  prostate vs. myeloid_neoplasm,ovary

SEQ ID NO: 475321 - DNA, 550 bp, Homo sapiens; identical to SEQ ID NO: 455613
  chr11:64512349-64512899
  hyper
  prostate vs. ovary

SEQ ID NO: 475322 - DNA, 61 bp, Homo sapiens; identical to SEQ ID NO: 345394
  chr11:64513748-64513809
  hyper
  prostate vs. multiple_myeloma,anorectal

SEQ ID NO: 475323 - DNA, 88 bp, Homo sapiens; identical to SEQ ID NO: 372764
  chr11:65420289-65420377
  hyper
  prostate vs. lung,upper_gi

SEQ ID NO: 475324 - DNA, 2 bp, Homo sapiens
  chr11:66885239-66885241
  hyper
  prostate vs. lymphoid_neoplasm,multiple_myeloma
cg

SEQ ID NO: 475325 - DNA, 112 bp, Homo sapiens; identical to SEQ ID NO: 351230
  chr11:66886029-66886141
  hyper
  prostate vs. lymphoid_neoplasm,multiple_myeloma

SEQ ID NO: 475326 - DNA, 232 bp, Homo sapiens
  chr11:69451967-69452199
  hyper
  prostate vs. anorectal,myeloid_neoplasm, pancreas_gallbladder
cgcggggatgcggggtcctccccgcagtcttccggaaagggcgggggagggcgcggcaagttccggagtggggcatgccgtgggagcccacgagggcctcagcgcggatcctccgccggaaaaccggctcccgcgagccgccgccgcaggtttcctaggccccgcgagtcccgcagcgaagccctgcgtctccgtccgacgcgggggtctgctcagcctcgggtgggccgcg

SEQ ID NO: 475327 - DNA, 369 bp, Homo sapiens
  chr11:69452289-69452658
  hyper
  prostate vs. anorectal,myeloid_neoplasm, pancreas_gallbladder
tctcgatctgggcgcctactccccaccacttggtctgagaggggctggggccggaaggccagggaatctctggtggatttgggggttcatattgctcagggtaccagccgatgcgttttgaggggcgggagtcgaggaattagaatcgcctttaaccctcaagagttgcgccttcagcctcgggatcccagatgcgtcgttggagccagggccgcccccctacctgttgggtttgcgttttaactccagcgcacaccttgccggcagccctcggagctaggggaggggtctcgtttccccgcagcccgccggacagacgactggggcacgggaggggcggtggcagggtggtctgtgtgtggctgaaac

SEQ ID NO: 475328 - DNA, 244 bp, Homo sapiens; identical to SEQ ID NO: 466232
  chr11:69452414-69452658
  hyper
  prostate vs. cervical

SEQ ID NO: 475329 - DNA, 76 bp, Homo sapiens; identical to SEQ ID NO: 455625
  chr11:76033216-76033292
  hyper
  prostate vs. pancreas_gallbladder,multiple_myeloma

SEQ ID NO: 475330 - DNA, 14 bp, Homo sapiens
  chr11:76033342-76033356
  hyper
  prostate vs. pancreas_gallbladder,multiple_myeloma
cgcctgtgctggcg

SEQ ID NO: 475331 - DNA, 457 bp, Homo sapiens; identical to SEQ ID NO: 454134
  chr11:111169516-111169973
  hyper
  prostate vs. liver_bileduct,cervical

SEQ ID NO: 475332 - DNA, 291 bp, Homo sapiens
  chr11:111412304-111412595
  hyper
  prostate vs. anorectal
gaggaggtaaagtgctctggcttctggcttctttcagttgttctgcatgtcggggggagaacatccgtgcccttttctcagatcctttttgcgggtgccaacagcttgaccaaacgggacagaggagactgggaacctcctctactctggcatcctggcttgcgaaactaatttaaagaatgtaaagttggtttcaggatgggggcggggcggcaaaagaggtgggaagctgaattgagctgcttgggttagggctgcgtgggctctgtccttggtcgcggggaacagaag

SEQ ID NO: 475333 - DNA, 48 bp, Homo sapiens; identical to SEQ ID NO: 372838
  chr11:111412624-111412672
  hyper
  prostate vs. anorectal

SEQ ID NO: 475334 - DNA, 365 bp, Homo sapiens; identical to SEQ ID NO: 359962
  chr11:125133244-125133609
  hyper
  prostate vs. liver_bileduct,cervical,anorectal

SEQ ID NO: 475335 - DNA, 33 bp, Homo sapiens
  chr11:129243894-129243927
  hyper
  prostate vs. colorectal,myeloid_neoplasm
cgacagagtgaggctcggtctcaaaaaaaaaag

SEQ ID NO: 475336 - DNA, 4 bp, Homo sapiens
  chr11:129244663-129244667
  hyper
  prostate vs. colorectal,myeloid_neoplasm
tgtc

SEQ ID NO: 475337 - DNA, 86 bp, Homo sapiens; identical to SEQ ID NO: 452813
  chr12:4377809-4377895
  hyper
  prostate vs. lymphoid_neoplasm,non_cancer, myeloid_neoplasm,thyroid

SEQ ID NO: 475338 - DNA, 142 bp, Homo sapiens; identical to SEQ ID NO: 452814
  chr12:4378558-4378700
  hyper
  prostate vs. lymphoid_neoplasm,non_cancer, myeloid_neoplasm,thyroid

SEQ ID NO: 475339 - DNA, 245 bp, Homo sapiens; identical to SEQ ID NO: 452815
  chr12:4378558-4378803
  hyper
  prostate vs. non_cancer,myeloid_neoplasm, lymphoid_neoplasm,thyroid,colorectal

SEQ ID NO: 475340 - DNA, 88 bp, Homo sapiens; identical to SEQ ID NO: 454142
  chr12:4378715-4378803
  hyper
  prostate vs. colorectal

SEQ ID NO: 475341 - DNA, 36 bp, Homo sapiens; identical to SEQ ID NO: 360013
  chr12:5542974-5543010
  hyper
  prostate vs. sarcoma

SEQ ID NO: 475342 - DNA, 95 bp, Homo sapiens; identical to SEQ ID NO: 347209
  chr12:6445038-6445133
  hyper
  prostate vs. liver_bileduct

SEQ ID NO: 475343 - DNA, 539 bp, Homo sapiens; identical to SEQ ID NO: 360020
  chr12:7260775-7261314
  hyper
  prostate vs. lymphoid_neoplasm,liver_bileduct

SEQ ID NO: 475344 - DNA, 3 bp, Homo sapiens
  chr12:8088951-8088954
  hyper
  prostate vs. upper_gi,melanoma,pancreas_gallbladder, colorectal,anorectal,bladder_and_urothelial,thyroid
aac

SEQ ID NO: 475345 - DNA, 104 bp, Homo sapiens; identical to SEQ ID NO: 334456
  chr12:8113465-8113569
  hyper
  prostate vs. pancreas_gallbladder,bladder_and_urothelial, multiple_myeloma,melanoma,sarcoma

SEQ ID NO: 475346 - DNA, 335 bp, Homo sapiens; identical to SEQ ID NO: 468698
  chr12:46766939-46767274
  hyper
  prostate vs. head_and_neck,colorectal,cervical, multiple_myeloma,myeloid_neoplasm,anorectal,uterine,upper_gi, non_cancer,bladder_and_urothelial,ovary,breast

SEQ ID NO: 475347 - DNA, 939 bp, Homo sapiens; identical to SEQ ID NO: 334505
  chr12:48591606-48592545
  hyper
  prostate vs. myeloid_neoplasm

SEQ ID NO: 475348 - DNA, 3 bp, Homo sapiens
  chr12:49363675-49363678
  hyper
  prostate vs. anorectal,thyroid,cervical,head_and_neck, uterine,non_cancer
cgc

SEQ ID NO: 475349 - DNA, 61 bp, Homo sapiens; identical to SEQ ID NO: 473693
  chr12:49364178-49364239
  hyper
  prostate vs. anorectal,thyroid,cervical,head_and_neck, uterine,non_cancer

SEQ ID NO: 475350 - DNA, 61 bp, Homo sapiens; identical to SEQ ID NO: 455654
  chr12:49392537-49392598
  hyper
  prostate vs. multiple_myeloma,thyroid,non_cancer

SEQ ID NO: 475351 - DNA, 61 bp, Homo sapiens; identical to SEQ ID NO: 455654
  chr12:49392537-49392598
  hyper
  prostate vs. multiple_myeloma,anorectal,non_cancer, colorectal,pancreas_gallbladder,upper_gi,thyroid

SEQ ID NO: 475352 - DNA, 295 bp, Homo sapiens; identical to SEQ ID NO: 351347
  chr12:49392636-49392931
  hyper
  prostate vs. multiple_myeloma,anorectal,non_cancer, colorectal,pancreas_gallbladder,upper_gi,thyroid

SEQ ID NO: 475353 - DNA, 532 bp, Homo sapiens; identical to SEQ ID NO: 334512
  chr12:49658702-49659234
  hyper
  prostate vs. breast

SEQ ID NO: 475354 - DNA, 300 bp, Homo sapiens; identical to SEQ ID NO: 334520
  chr12:50339307-50339607
  hyper
  prostate vs. renal,uterine,pancreas_gallbladder,upper_gi, bladder_and_urothelial,non_cancer,thyroid

SEQ ID NO: 475355 - DNA, 3 bp, Homo sapiens
  chr12:52401537-52401540
  hyper
  prostate vs. anorectal,melanoma,thyroid,head_and_neck
tcc

SEQ ID NO: 475356 - DNA, 54 bp, Homo sapiens; identical to SEQ ID NO: 347231
  chr12:52401605-52401659
  hyper
  prostate vs. anorectal,melanoma,thyroid,head_and_neck

SEQ ID NO: 475357 - DNA, 311 bp, Homo sapiens; identical to SEQ ID NO: 334529
  chr12:53267978-53268289
  hyper
  prostate vs. upper_gi,head_and_neck,colorectal, bladder_and_urothelial,ovary,lung,uterine,pancreas_gallbladder, breast

SEQ ID NO: 475358 - DNA, 194 bp, Homo sapiens
  chr12:53719360-53719554
  hyper
  prostate vs. melanoma,multiple_myeloma,ovary,cervical, uterine
cgggggcgggagtggcgtcagggtggggagggggctcgtaacccgagcccccccaggatcgccggccccctcccacccgtagcagcccctcttgcgacccgtgcggtggacagtccgacgcggggcgcagctgggagtcgggcccaggccggggggagcggcctgtgagccccctcagcccagcggggtaacct

SEQ ID NO: 475359 - DNA, 122 bp, Homo sapiens; identical to SEQ ID NO: 455663
  chr12:54088960-54089082
  hyper
  prostate vs. thyroid,myeloid_neoplasm

SEQ ID NO: 475360 - DNA, 15 bp, Homo sapiens
  chr12:54089645-54089660
  hyper
  prostate vs. thyroid,myeloid_neoplasm
agcgagtttgggaac

SEQ ID NO: 475361 - DNA, 58 bp, Homo sapiens; identical to SEQ ID NO: 455665
  chr12:54144782-54144840
  hyper
  prostate vs. ovary,non_cancer,uterine

SEQ ID NO: 475362 - DNA, 321 bp, Homo sapiens; identical to SEQ ID NO: 468717
  chr12:54389321-54389642
  hyper
  prostate vs. upper_gi,cervical

SEQ ID NO: 475363 - DNA, 30 bp, Homo sapiens; identical to SEQ ID NO: 455672
  chr12:54521011-54521041
  hyper
  prostate vs. cervical,anorectal,non_cancer, myeloid_neoplasm

SEQ ID NO: 475364 - DNA, 104 bp, Homo sapiens; identical to SEQ ID NO: 460680
  chr12:54811879-54811983
  hyper
  prostate vs. liver_bileduct

SEQ ID NO: 475365 - DNA, 184 bp, Homo sapiens; identical to SEQ ID NO: 345428
  chr12:63026256-63026440
  hyper
  prostate vs. pancreas_gallbladder,sarcoma, multiple_myeloma,uterine,myeloid_neoplasm,non_cancer,ovary

SEQ ID NO: 475366 - DNA, 14 bp, Homo sapiens
  chr12:65220439-65220453
  hyper
  prostate vs. ovary
cttaatattccttc

SEQ ID NO: 475367 - DNA, 393 bp, Homo sapiens; identical to SEQ ID NO: 334614
  chr12:90101352-90101745
  hyper
  prostate vs. lymphoid_neoplasm,bladder_and_urothelial, ovary,colorectal,pancreas_gallbladder,uterine,cervical, anorectal,upper_gi,multiple_myeloma,non_cancer,myeloid_neoplasm

SEQ ID NO: 475368 - DNA, 31 bp, Homo sapiens; identical to SEQ ID NO: 452825
  chr12:94543992-94544023
  hyper
  prostate vs. thyroid

SEQ ID NO: 475369 - DNA, 86 bp, Homo sapiens; identical to SEQ ID NO: 345430
  chr12:94544052-94544138
  hyper
  prostate vs. thyroid

SEQ ID NO: 475370 - DNA, 121 bp, Homo sapiens
  chr12:103311040-103311161
  hyper
  prostate vs. breast
cgtggtgcatctccgcacagtaacgcccctcgtgggcgttgtcctgacgcaggaggccagggcagcctgccggatgctccaggtcacctgcccaggacgggccggaggggaggggctgagg

SEQ ID NO: 475371 - DNA, 204 bp, Homo sapiens; identical to SEQ ID NO: 203148
  chr12:103311290-103311494
  hyper
  prostate vs. breast

SEQ ID NO: 475372 - DNA, 100 bp, Homo sapiens
  chr12:103311496-103311596
  hyper
  prostate vs. breast
gaacgctgagcacagcaggtaaagagcaaatgtaagagcgatctgggtttaaatccagcctggtgttctccagctattcgcacaactgctcctgaagctc

SEQ ID NO: 475373 - DNA, 349 bp, Homo sapiens; identical to SEQ ID NO: 459395
  chr12:104851545-104851894
  hyper
  prostate vs. melanoma,multiple_myeloma,non_cancer, myeloid_neoplasm,bladder_and_urothelial

SEQ ID NO: 475374 - DNA, 321 bp, Homo sapiens; identical to SEQ ID NO: 455674
  chr12:111844290-111844611
  hyper
  prostate vs. lymphoid_neoplasm,anorectal,liver_bileduct, non_cancer,myeloid_neoplasm,sarcoma,multiple_myeloma,upper_gi, colorectal

SEQ ID NO: 475375 - DNA, 99 bp, Homo sapiens; identical to SEQ ID NO: 351412
  chr12:111844690-111844789
  hyper
  prostate vs. lymphoid_neoplasm,anorectal,liver_bileduct, non_cancer,myeloid_neoplasm,sarcoma,multiple_myeloma,upper_gi, colorectal

SEQ ID NO: 475376 - DNA, 168 bp, Homo sapiens; identical to SEQ ID NO: 462415
  chr13:20735265-20735433
  hyper
  prostate vs. myeloid_neoplasm,head_and_neck,uterine, non_cancer,cervical,ovary,colorectal,thyroid, bladder_and_urothelial,anorectal

SEQ ID NO: 475377 - DNA, 14 bp, Homo sapiens
  chr13:22243231-22243245
  hyper
  prostate vs. myeloid_neoplasm
cgcttttttcccca

SEQ ID NO: 475378 - DNA, 142 bp, Homo sapiens; identical to SEQ ID NO: 351449
  chr13:22243864-22244006
  hyper
  prostate vs. myeloid_neoplasm

SEQ ID NO: 475379 - DNA, 536 bp, Homo sapiens; identical to SEQ ID NO: 373227
  chr13:22244073-22244609
  hyper
  prostate vs. lung

SEQ ID NO: 475380 - DNA, 201 bp, Homo sapiens; identical to SEQ ID NO: 452842
  chr13:29292491-29292692
  hyper
  prostate vs. uterine,ovary

SEQ ID NO: 475381 - DNA, 242 bp, Homo sapiens; identical to SEQ ID NO: 345442
  chr13:29293342-29293584
  hyper
  prostate vs. multiple_myeloma,uterine

SEQ ID NO: 475382 - DNA, 178 bp, Homo sapiens; identical to SEQ ID NO: 468743
  chr13:33000891-33001069
  hyper
  prostate vs. anorectal,multiple_myeloma,cervical

SEQ ID NO: 475383 - DNA, 204 bp, Homo sapiens; identical to SEQ ID NO: 351462
  chr13:33001228-33001432
  hyper
  prostate vs. anorectal,multiple_myeloma,cervical

SEQ ID NO: 475384 - DNA, 481 bp, Homo sapiens
  chr13:45491759-45492240
  hyper
  prostate vs. breast
cgggtgtatttcggcatgcgaccgcttggttcccccgctttccttcacctctgacctaatctctcacttcaaaaactgacttcaagctgttgccagatacgtcccttccgccgcctgccgcaggtggctagggtctgagcacacttgaacctcacacccgccccaggggtagctccttggttcccttcagccccgatgtgtccctcgtgctttgaaatggaattacagttttggttaaaaacatgccttttccgagttaggaagaatctaaatcgactgaacgccagtctaaaatttcggcgttcccacaccgggagtcgaacccgggccgcctgggtgaaaaccaggaatcctaaccgctagaccatgtgggagacggcaatagcgactccaagcctagacaaattgagtcttctcggtcggcttccgcccactccatcgcgttcatccgtaggcgtcaaacctgctcctgcgcctgcgc

SEQ ID NO: 475385 - DNA, 256 bp, Homo sapiens
  chr13:45492271-45492527
  hyper
  prostate vs. breast
cgcattctactgtttctctccttgcaggggcccttgaatctttcttcaatctactctcgcgtctttcgtgatctcatccagtctcctggtgctaggtaccatgtcgacaccaatgtagacactagattggatgagtcattgttcacaattcctcacaaaactcctgcaaagtccaaaagaactggggtttgaatgttagaggctggtgaagaagtgaggaccacggggcgtcataacaccgcgcagtggaggccac

SEQ ID NO: 475386 - DNA, 200 bp, Homo sapiens; identical to SEQ ID NO: 457490
  chr13:45492040-45492240
  hyper
  prostate vs. breast,bladder_and_urothelial,upper_gi

SEQ ID NO: 475387 - DNA, 546 bp, Homo sapiens; identical to SEQ ID NO: 360292
  chr13:45492271-45492817
  hyper
  prostate vs. breast,bladder_and_urothelial,upper_gi

SEQ ID NO: 475388 - DNA, 139 bp, Homo sapiens; identical to SEQ ID NO: 452850
  chr13:74707123-74707262
  hyper
  prostate vs. uterine,breast,multiple_myeloma,non_cancer, thyroid,ovary

SEQ ID NO: 475389 - DNA, 212 bp, Homo sapiens; identical to SEQ ID NO: 452851
  chr13:74707414-74707626
  hyper
  prostate vs. uterine,breast,multiple_myeloma,non_cancer, thyroid,ovary

SEQ ID NO: 475390 - DNA, 410 bp, Homo sapiens; identical to SEQ ID NO: 452852
  chr13:74707668-74708078
  hyper
  prostate vs. uterine,breast,multiple_myeloma,non_cancer, thyroid,ovary

SEQ ID NO: 475391 - DNA, 915 bp, Homo sapiens; identical to SEQ ID NO: 351487
  chr13:74707668-74708583
  hyper
  prostate vs. ovary,uterine,sarcoma,multiple_myeloma, breast,lymphoid_neoplasm,non_cancer

SEQ ID NO: 475392 - DNA, 303 bp, Homo sapiens
  chr13:114565969-114566272
  hyper
  prostate vs. sarcoma,thyroid,breast,colorectal, head_and_neck,ovary,lung,upper_gi,uterine,multiple_myeloma, bladder_and_urothelial,myeloid_neoplasm,cervical, pancreas_gallbladder,non_cancer
cggggccagcaccgtcgggctcctgaaagcacccgctgcctccaggagagcacctggcagaacggggccgcggagccgccctcccctcccgcatgcggccccgctcgattcctggaatcttatttttggacctgctgccgcaagcagttcccgccctcggccctttcaattcctctttcgggaggggactgctctccacccctctcaggaggacgaggcgcggcccgggggttcctcacctccagcccagcagagggagggccgcggggaagcggtttgggttttaaccattgtgtttctctc

SEQ ID NO: 475393 - DNA, 114 bp, Homo sapiens; identical to SEQ ID NO: 347278
  chr13:114566409-114566523
  hyper
  prostate vs. sarcoma,thyroid,breast,colorectal, head_and_neck,ovary,lung,upper_gi,uterine,multiple_myeloma, bladder_and_urothelial,myeloid_neoplasm,cervical, pancreas_gallbladder,non_cancer

SEQ ID NO: 475394 - DNA, 620 bp, Homo sapiens
  chr14:21539350-21539970
  hyper
  prostate vs. pancreas_gallbladder,upper_gi,ovary, melanoma,renal,sarcoma,cervical,head_and_neck,colorectal, bladder_and_urothelial
cgctggacgctggagggtacgctaaggagaagcccacaccaacaggagtgaacactgccctgggaactttcactgcagagtactctgaagcaccgctgcgagagtgggcactgccagagagagcgcccactgcaaagagggcgggggcatggccaaggggccgctcgctgcagagtggaggagggggagaggccttgccagggggagctcaccgcagggagtggaggaggggcaggggcactactggggccgcccctctacggagggaagggcaccctctggcagggaggctggaggaaaaagaaagaggaactgggccagggagagctgactcagtctctctggtctcctctctggtccccgccggcaggaggctgggtctccgtgctcccgcccgccgcctccctccccagacccctcctcccctcctgccgcggccgtttcctgtggctgagactctcgctcagccatgagctcaccgcccctaatgggttgcagctgcctcgctgctcaagccctagctccgcactccctgccttggagcagacggccccactctgcctcacccccgcccatctccaccttccccccacccacgcgcactgcgtccgcctggtccc

SEQ ID NO: 475395 - DNA, 7 bp, Homo sapiens
  chr14:21540023-21540030
  hyper
  prostate vs. pancreas_gallbladder,upper_gi,ovary, melanoma,renal,sarcoma,cervical,head_and_neck,colorectal, bladder_and_urothelial
cgctgac

SEQ ID NO: 475396 - DNA, 78 bp, Homo sapiens; identical to SEQ ID NO: 351523
  chr14:23835314-23835392
  hyper
  prostate vs. head_and_neck,multiple_myeloma,sarcoma, cervical,anorectal

SEQ ID NO: 475397 - DNA, 57 bp, Homo sapiens
  chr14:37116049-37116106
  hyper
  prostate vs. head_and_neck
cgggacaacttggagcctgcttctggggagccacacacgtcctctcccacttcttgc

SEQ ID NO: 475398 - DNA, 15 bp, Homo sapiens
  chr14:37116652-37116667
  hyper
  prostate vs. head_and_neck
cggcctcagaacccc

SEQ ID NO: 475399 - DNA, 53 bp, Homo sapiens; identical to SEQ ID NO: 455691
  chr14:38725469-38725522
  hyper
  prostate vs. myeloid_neoplasm

SEQ ID NO: 475400 - DNA, 315 bp, Homo sapiens; identical to SEQ ID NO: 452872
  chr14:52781114-52781429
  hyper
  prostate vs. myeloid_neoplasm,upper_gi

SEQ ID NO: 475401 - DNA, 129 bp, Homo sapiens; identical to SEQ ID NO: 462447
  chr14:55595810-55595939
  hyper
  prostate vs. head_and_neck,bladder_and_urothelial, upper_gi,multiple_myeloma,ovary,cervical,colorectal, pancreas_gallbladder,renal,breast,anorectal,sarcoma,uterine, non_cancer,thyroid

SEQ ID NO: 475402 - DNA, 134 bp, Homo sapiens; identical to SEQ ID NO: 462448
  chr14:55595968-55596102
  hyper
  prostate vs. head_and_neck,bladder_and_urothelial, upper_gi,multiple_myeloma,ovary,cervical,colorectal, pancreas_gallbladder,renal,breast,anorectal,sarcoma,uterine, non_cancer,thyroid

SEQ ID NO: 475403 - DNA, 437 bp, Homo sapiens; identical to SEQ ID NO: 347298
  chr14:55596153-55596590
  hyper
  prostate vs. head_and_neck,bladder_and_urothelial, upper_gi,multiple_myeloma,ovary,cervical,colorectal, pancreas_gallbladder,renal,breast,anorectal,sarcoma,uterine, non_cancer,thyroid

SEQ ID NO: 475404 - DNA, 196 bp, Homo sapiens; identical to SEQ ID NO: 334941
  chr14:62105869-62106065
  hyper
  prostate vs. lymphoid_neoplasm,renal

SEQ ID NO: 475405 - DNA, 619 bp, Homo sapiens
  chr14:73957523-73958142
  hyper
  prostate vs. pancreas_gallbladder,liver_bileduct,lung
cgctgccgctacagcttgaagccaaacatttaatgaaagagagcgggaggggccgaatagaagaatgatgggcgtggccaaccccgaggtggctggaggccgcgcccccttcccagagtgcaccgcagccgctgcattcaggaaccgctttagcttcgcccccggccggccgggcggggaagactggtgtggtctggccatggatgggctccaggccagtgcagggccgttgaggcgcgggcggccgaagcgccggcgcaagccccagccacacagcgggtcggtcctggccctgcccttgaggtccaggaagatacgaaagcagctgcgaagtgttgtatcccgcatggcagcgctgaggacgcagacgctgcctagcgagaactcggaggaatcgagggtggagtcgacggccgacgacctgggggacgcgctacccggtggggcggcggtggcggcgtcccggacgcagcccggcgagagccatacggccacctggggcccgcagagctgctggaggcctcgcccgccgcgcgctccctgcagaccccgtcggcgcgcctggtgcccgcttccgcgccgcccgcgcgcctggtggaggtgcccgccgcgccggtcc

SEQ ID NO: 475406 - DNA, 338 bp, Homo sapiens
  chr14:73957804-73958142
  hyper
  prostate vs. liver_bileduct,pancreas_gallbladder
cggtcctggccctgcccttgaggtccaggaagatacgaaagcagctgcgaagtgttgtatcccgcatggcagcgctgaggacgcagacgctgcctagcgagaactcggaggaatcgagggtggagtcgacggccgacgacctgggggacgcgctacccggtggggcggcggtggcggcgtcccggacgcagcccggcgagagccatacggccacctggggcccgcagagctgctggaggcctcgcccgccgcgcgctccctgcagaccccgtcggcgcgcctggtgcccgcttccgcgccgcccgcgcgcctggtggaggtgcccgccgcgccggtcc

SEQ ID NO: 475407 - DNA, 150 bp, Homo sapiens
  chr14:73958379-73958529
  hyper
  prostate vs. liver_bileduct,pancreas_gallbladder
ggcgcctatgggagcgcgaggcggtgctggtgcggcggcaggaccacacctactaccagggacttttctctaccgctgacctggattcgatgctgcgcaacgaggaggtgcagttcggccagcatttggacgccgctcgctacatcaacg

SEQ ID NO: 475408 - DNA, 50 bp, Homo sapiens; identical to SEQ ID NO: 462458
  chr14:74208160-74208210
  hyper
  prostate vs. bladder_and_urothelial,renal, multiple_myeloma

SEQ ID NO: 475409 - DNA, 26 bp, Homo sapiens
  chr14:74208319-74208345
  hyper
  prostate vs. bladder_and_urothelial,renal, multiple_myeloma
accaggaatgcccctcccaggctatc

SEQ ID NO: 475410 - DNA, 129 bp, Homo sapiens; identical to SEQ ID NO: 351590
  chr14:75894282-75894411
  hyper
  prostate vs. lung,uterine,bladder_and_urothelial, pancreas_gallbladder,liver_bileduct

SEQ ID NO: 475411 - DNA, 333 bp, Homo sapiens; identical to SEQ ID NO: 334977
  chr14:77428133-77428466
  hyper
  prostate vs. upper_gi,pancreas_gallbladder,head_and_neck, liver_bileduct,lymphoid_neoplasm,breast,bladder_and_urothelial, renal,uterine,multiple_myeloma,melanoma,sarcoma,non_cancer

SEQ ID NO: 475412 - DNA, 5 bp, Homo sapiens
  chr14:90084014-90084019
  hyper
  prostate vs. multiple_myeloma,thyroid,non_cancer,uterine, bladder_and_urothelial
cgtgt

SEQ ID NO: 475413 - DNA, 40 bp, Homo sapiens; identical to SEQ ID NO: 454180
  chr14:90849401-90849441
  hyper
  prostate vs. anorectal,ovary,non_cancer,multiple_myeloma, thyroid,sarcoma,myeloid_neoplasm,upper_gi,pancreas_gallbladder, colorectal,liver_bileduct

SEQ ID NO: 475414 - DNA, 383 bp, Homo sapiens; identical to SEQ ID NO: 454181
  chr14:90849476-90849859
  hyper
  prostate vs. anorectal,ovary,non_cancer,multiple_myeloma, thyroid,sarcoma,myeloid_neoplasm,upper_gi,pancreas_gallbladder, colorectal,liver_bileduct

SEQ ID NO: 475415 - DNA, 54 bp, Homo sapiens; identical to SEQ ID NO: 454182
  chr14:90849897-90849951
  hyper
  prostate vs. anorectal,ovary,non_cancer,multiple_myeloma, thyroid,sarcoma,myeloid_neoplasm,upper_gi,pancreas_gallbladder, colorectal,liver_bileduct

SEQ ID NO: 475416 - DNA, 137 bp, Homo sapiens; identical to SEQ ID NO: 454183
  chr14:90849722-90849859
  hyper
  prostate vs. anorectal,thyroid,myeloid_neoplasm, non_cancer,pancreas_gallbladder,colorectal

SEQ ID NO: 475417 - DNA, 54 bp, Homo sapiens; identical to SEQ ID NO: 454182
  chr14:90849897-90849951
  hyper
  prostate vs. anorectal,thyroid,myeloid_neoplasm, non_cancer,pancreas_gallbladder,colorectal

SEQ ID NO: 475418 - DNA, 67 bp, Homo sapiens; identical to SEQ ID NO: 351606
  chr14:90850476-90850543
  hyper
  prostate vs. anorectal,thyroid,myeloid_neoplasm, non_cancer,pancreas_gallbladder,colorectal

SEQ ID NO: 475419 - DNA, 74 bp, Homo sapiens
  chr14:91580279-91580353
  hyper
  prostate vs. melanoma,ovary,head_and_neck
cggggagagcaggttaactcttgcagggagaactgggcttgcagggtccagccagctgccagcagctctgcagc

SEQ ID NO: 475420 - DNA, 201 bp, Homo sapiens; identical to SEQ ID NO: 360519
  chr14:91580494-91580695
  hyper
  prostate vs. melanoma,ovary,head_and_neck

SEQ ID NO: 475421 - DNA, 479 bp, Homo sapiens; identical to SEQ ID NO: 334996
  chr14:91581063-91581542
  hyper
  prostate vs. lymphoid_neoplasm,anorectal,head_and_neck, myeloid_neoplasm,non_cancer

SEQ ID NO: 475422 - DNA, 142 bp, Homo sapiens; identical to SEQ ID NO: 335034
  chr14:103430237-103430379
  hyper
  prostate vs. sarcoma,lung,cervical,head_and_neck, melanoma,liver_bileduct,anorectal,upper_gi,ovary, bladder_and_urothelial,pancreas_gallbladder,uterine,renal, lymphoid_neoplasm,breast,colorectal,multiple_myeloma

SEQ ID NO: 475423 - DNA, 99 bp, Homo sapiens; identical to SEQ ID NO: 473775
  chr15:28341522-28341621
  hyper
  prostate vs. thyroid

SEQ ID NO: 475424 - DNA, 20 bp, Homo sapiens
  chr15:31620725-31620745
  hyper
  prostate vs. upper_gi
cggaaaggaatgccctggcc

SEQ ID NO: 475425 - DNA, 247 bp, Homo sapiens; identical to SEQ ID NO: 373600
  chr15:31620800-31621047
  hyper
  prostate vs. upper_gi

SEQ ID NO: 475426 - DNA, 90 bp, Homo sapiens
  chr15:35014062-35014152
  hyper
  prostate vs. melanoma,sarcoma
cgcgcaactggagagggcccttctgcaggagagaagagggaatgtgctgaatgagttaaagtgccctttgtccaccccccccccccgccc

SEQ ID NO: 475427 - DNA, 110 bp, Homo sapiens; identical to SEQ ID NO: 360590
  chr15:35014287-35014397
  hyper
  prostate vs. melanoma,sarcoma

SEQ ID NO: 475428 - DNA, 385 bp, Homo sapiens; identical to SEQ ID NO: 460730
  chr15:41786420-41786805
  hyper
  prostate vs. anorectal,myeloid_neoplasm,thyroid,upper_gi

SEQ ID NO: 475429 - DNA, 6 bp, Homo sapiens
  chr15:41805862-41805868
  hyper
  prostate vs. sarcoma,myeloid_neoplasm,thyroid, head_and_neck,non_cancer
acccgc

SEQ ID NO: 475430 - DNA, 205 bp, Homo sapiens; identical to SEQ ID NO: 455707
  chr15:41805870-41806075
  hyper
  prostate vs. sarcoma,myeloid_neoplasm,thyroid, head_and_neck,non_cancer

SEQ ID NO: 475431 - DNA, 42 bp, Homo sapiens
  chr15:43415157-43415199
  hyper
  prostate vs. pancreas_gallbladder,head_and_neck,upper_gi, bladder_and_urothelial,uterine,sarcoma,colorectal,ovary, cervical,lung,non_cancer,anorectal,breast
cgtaaatccttccagtttttggcgcccgggtatttgacttgc

SEQ ID NO: 475432 - DNA, 279 bp, Homo sapiens; identical to SEQ ID NO: 347333
  chr15:43415273-43415552
  hyper
  prostate vs. pancreas_gallbladder,head_and_neck,upper_gi, bladder_and_urothelial,uterine,sarcoma,colorectal,ovary, cervical,lung,non_cancer,anorectal,breast

SEQ ID NO: 475433 - DNA, 92 bp, Homo sapiens
  chr15:45406361-45406453
  hyper
  prostate vs. anorectal
cgccagtgtgagcatctggacctagggctcaccctcctgccgtggaggtggggcccttatttgcacaacctcttccagctcagaccagcccc

SEQ ID NO: 475434 - DNA, 54 bp, Homo sapiens; identical to SEQ ID NO: 360623
  chr15:45406895-45406949
  hyper
  prostate vs. anorectal

SEQ ID NO: 475435 - DNA, 211 bp, Homo sapiens; identical to SEQ ID NO: 459429
  chr15:45669920-45670131
  hyper
  prostate vs. liver_bileduct

SEQ ID NO: 475436 - DNA, 275 bp, Homo sapiens; identical to SEQ ID NO: 459430
  chr15:45670188-45670463
  hyper
  prostate vs. liver_bileduct

SEQ ID NO: 475437 - DNA, 344 bp, Homo sapiens; identical to SEQ ID NO: 360640
  chr15:51386268-51386612
  hyper
  prostate vs. myeloid_neoplasm,multiple_myeloma

SEQ ID NO: 475438 - DNA, 30 bp, Homo sapiens; identical to SEQ ID NO: 455710
  chr15:68260709-68260739
  hyper

SEQ ID NO: 475439 - DNA, 53 bp, Homo sapiens; identical to SEQ ID NO: 473791
  chr15:68723471-68723524
  hyper
  prostate vs. multiple_myeloma,thyroid,anorectal,cervical

SEQ ID NO: 475440 - DNA, 110 bp, Homo sapiens
  chr15:68724333-68724443
  hyper
  prostate vs. bladder_and_urothelial,sarcoma, multiple_myeloma,lung
ggcagagggtgggcacctacctggccacaggctgagcgcccaggccaccaccaggcccctgggcaggtccatggcccgcggcacggcggctgggtccggtgtgcagcggc

SEQ ID NO: 475441 - DNA, 188 bp, Homo sapiens; identical to SEQ ID NO: 351710
  chr15:68724480-68724668
  hyper
  prostate vs. bladder_and_urothelial,sarcoma, multiple_myeloma,lung

SEQ ID NO: 475442 - DNA, 7 bp, Homo sapiens
  chr15:72564635-72564642
  hyper
  prostate vs. lymphoid_neoplasm
cgctctg

SEQ ID NO: 475443 - DNA, 331 bp, Homo sapiens; identical to SEQ ID NO: 335170
  chr15:72668400-72668731
  hyper
  prostate vs. pancreas_gallbladder,liver_bileduct,ovary

SEQ ID NO: 475444 - DNA, 139 bp, Homo sapiens; identical to SEQ ID NO: 468811
  chr15:75470758-75470897
  hyper
  prostate vs. bladder_and_urothelial

SEQ ID NO: 475445 - DNA, 494 bp, Homo sapiens; identical to SEQ ID NO: 468817
  chr15:89437837-89438331
  hyper
  prostate vs. bladder_and_urothelial,cervical,sarcoma, head_and_neck,ovary,anorectal,non_cancer

SEQ ID NO: 475446 - DNA, 128 bp, Homo sapiens; identical to SEQ ID NO: 468818
  chr15:89438421-89438549
  hyper
  prostate vs. bladder_and_urothelial,cervical,sarcoma, head_and_neck,ovary,anorectal,non_cancer

SEQ ID NO: 475447 - DNA, 279 bp, Homo sapiens; identical to SEQ ID NO: 455714
  chr15:89438052-89438331
  hyper
  prostate vs. sarcoma,bladder_and_urothelial, head_and_neck,non_cancer,anorectal,thyroid,ovary, myeloid_neoplasm,uterine,multiple_myeloma,pancreas_gallbladder, cervical,renal

SEQ ID NO: 475448 - DNA, 250 bp, Homo sapiens; identical to SEQ ID NO: 204020
  chr15:89438421-89438671
  hyper
  prostate vs. sarcoma,bladder_and_urothelial, head_and_neck,non_cancer,anorectal,thyroid,ovary, myeloid_neoplasm,uterine,multiple_myeloma,pancreas_gallbladder, cervical,renal

SEQ ID NO: 475449 - DNA, 107 bp, Homo sapiens; identical to SEQ ID NO: 455716
  chr15:89438673-89438780
  hyper
  prostate vs. sarcoma,bladder_and_urothelial, head_and_neck,non_cancer,anorectal,thyroid,ovary, myeloid_neoplasm,uterine,multiple_myeloma,pancreas_gallbladder, cervical,renal

SEQ ID NO: 475450 - DNA, 101 bp, Homo sapiens; identical to SEQ ID NO: 345482
  chr15:89438863-89438964
  hyper
  prostate vs. sarcoma,bladder_and_urothelial, head_and_neck,non_cancer,anorectal,thyroid,ovary, myeloid_neoplasm,uterine,multiple_myeloma,pancreas_gallbladder, cervical,renal

SEQ ID NO: 475451 - DNA, 325 bp, Homo sapiens
  chr15:99090794-99091119
  hyper
  prostate vs. melanoma,anorectal
cgtcatattcagccctgtttaattcccactgtcttgggtctagaatttaggcttttgagaaatctttattgaattaatgaaaactcaaagaccacgattctgcattcccccaaatcctgaagtgcagtaggagcccatgcagggcttgggacgggctttttgcctcagcagccaggacagcctctgcatccgtgaccacctccccgcccccctcgcattcccccccatcccctggtgatatccttctagcgcaggctcgtgctctggaggcggggtggggccgggattctgcagctgtaaccaactcccccgctgggggcatggg

SEQ ID NO: 475452 - DNA, 237 bp, Homo sapiens
  chr15:99091372-99091609
  hyper
  prostate vs. melanoma,anorectal
actccgcataaactcccgttccagcccaaatcagaggcggtcgcagcagccgttcctcgtctccatcagcatccgcgttgccatttccccgtcctgagctgttgctcatatcaaatgtcactcggggatgactaagagccgatgttgatgaggagccttcagcgttacggtaaaggagctcgtgcaaacttagaccccagtcatctgacggtcacgtgggcgggcgtcgcggcccag

SEQ ID NO: 475453 - DNA, 20 bp, Homo sapiens
  chr15:99091663-99091683
  hyper
  prostate vs. melanoma,anorectal
ggcaggcgttacataaaccc

SEQ ID NO: 475454 - DNA, 1 bp, Homo sapiens
  chr16:1030271-1030272
  hyper
  prostate vs. myeloid_neoplasm,ovary
c

SEQ ID NO: 475455 - DNA, 349 bp, Homo sapiens; identical to SEQ ID NO: 335295
  chr16:14396725-14397074
  hyper
  prostate vs. breast

SEQ ID NO: 475456 - DNA, 10 bp, Homo sapiens
  chr16:23846783-23846793
  hyper
  prostate vs. non_cancer,myeloid_neoplasm,thyroid
cgctcctccc

SEQ ID NO: 475457 - DNA, 167 bp, Homo sapiens; identical to SEQ ID NO: 360802
  chr16:25704644-25704811
  hyper
  prostate vs. head_and_neck

SEQ ID NO: 475458 - DNA, 465 bp, Homo sapiens
  chr16:31213480-31213945
  hyper
  prostate vs. head_and_neck,anorectal,cervical, multiple_myeloma,upper_gi,bladder_and_urothelial
cgactgaggaggggcctggatcccagctggcgcggctccagagcctggaaggatatgggccaagtgatccccttcccttcccttcccgccgtggggccggggtcccgttggtcggtaggccaagcgtggggagcctcctttccggtagagcagctttgtttaggggtaggaggaacagaaagcggaagagcccgcggggtaagcgctggtgtgggtggaggggaaagacggggtggaggggaacgggggcggctcaccctggtgcgtggccgcctgcagctgcccggccatctcctgcaggcccatgtcgcgcagcacgttagcggtgagctcggcgccgtaggtctccaggtagaagctgaccagcttgtcggtgaggtccaaggcgtccatggacagcagcgcgccccgcgggatgcgcccgtagccctcgcgcagcggcaccgacagcagcttcagcttgaa

SEQ ID NO: 475459 - DNA, 24 bp, Homo sapiens
  chr16:31214140-31214164
  hyper
  prostate vs. head_and_neck,anorectal,cervical, multiple_myeloma,upper_gi,bladder_and_urothelial
gtccgttgccctccagcaaaaggc

SEQ ID NO: 475460 - DNA, 287 bp, Homo sapiens; identical to SEQ ID NO: 335352
  chr16:57519818-57520105
  hyper
  prostate vs. pancreas_gallbladder,upper_gi,lung,ovary, uterine

SEQ ID NO: 475461 - DNA, 292 bp, Homo sapiens; identical to SEQ ID NO: 347382
  chr16:67204024-67204316
  hyper
  prostate vs. myeloid_neoplasm,lung,cervical, head_and_neck,multiple_myeloma,ovary,renal,thyroid, liver_bileduct,non_cancer,upper_gi

SEQ ID NO: 475462 - DNA, 489 bp, Homo sapiens; identical to SEQ ID NO: 455741
  chr16:67204318-67204807
  hyper
  prostate vs. myeloid_neoplasm,lung,cervical, head_and_neck,multiple_myeloma,ovary,renal,thyroid, liver_bileduct,non_cancer,upper_gi

SEQ ID NO: 475463 - DNA, 3 bp, Homo sapiens
  chr16:68118222-68118225
  hyper
  prostate vs. anorectal,cervical,multiple_myeloma, non_cancer,uterine,myeloid_neoplasm,upper_gi
cgt

SEQ ID NO: 475464 - DNA, 134 bp, Homo sapiens; identical to SEQ ID NO: 345495
  chr16:68118915-68119049
  hyper
  prostate vs. anorectal,cervical,multiple_myeloma, non_cancer,uterine,myeloid_neoplasm,upper_gi

SEQ ID NO: 475465 - DNA, 111 bp, Homo sapiens; identical to SEQ ID NO: 373941
  chr16:69760293-69760404
  hyper
  prostate vs. breast

SEQ ID NO: 475466 - DNA, 465 bp, Homo sapiens; identical to SEQ ID NO: 455747
  chr16:87417704-87418169
  hyper
  prostate vs. sarcoma,cervical,ovary,anorectal, lymphoid_neoplasm,myeloid_neoplasm,uterine,lung,non_cancer

SEQ ID NO: 475467 - DNA, 50 bp, Homo sapiens; identical to SEQ ID NO: 351854
  chr16:87418200-87418250
  hyper
  prostate vs. sarcoma,cervical,ovary,anorectal, lymphoid_neoplasm,myeloid_neoplasm,uterine,lung,non_cancer

SEQ ID NO: 475468 - DNA, 515 bp, Homo sapiens; identical to SEQ ID NO: 360937
  chr17:4853391-4853906
  hyper
  prostate vs. upper_gi,colorectal,lung, bladder_and_urothelial,renal,melanoma,cervical

SEQ ID NO: 475469 - DNA, 409 bp, Homo sapiens; identical to SEQ ID NO: 335445
  chr17:6939640-6940049
  hyper
  prostate vs. lung,cervical,pancreas_gallbladder

SEQ ID NO: 475470 - DNA, 356 bp, Homo sapiens; identical to SEQ ID NO: 455755
  chr17:27038294-27038650
  hyper
  prostate vs. multiple_myeloma

SEQ ID NO: 475471 - DNA, 308 bp, Homo sapiens; identical to SEQ ID NO: 459466
  chr17:33700165-33700473
  hyper
  prostate vs. cervical,anorectal,uterine,non_cancer, myeloid_neoplasm

SEQ ID NO: 475472 - DNA, 85 bp, Homo sapiens; identical to SEQ ID NO: 459467
  chr17:33701376-33701461
  hyper
  prostate vs. cervical,anorectal,myeloid_neoplasm,thyroid

SEQ ID NO: 475473 - DNA, 207 bp, Homo sapiens; identical to SEQ ID NO: 459468
  chr17:33701376-33701583
  hyper
  prostate vs. cervical,anorectal,sarcoma

SEQ ID NO: 475474 - DNA, 168 bp, Homo sapiens; identical to SEQ ID NO: 345516
  chr17:33701612-33701780
  hyper
  prostate vs. cervical,anorectal,sarcoma

SEQ ID NO: 475475 - DNA, 130 bp, Homo sapiens; identical to SEQ ID NO: 462554
  chr17:38478466-38478596
  hyper
  prostate vs. thyroid,breast,lymphoid_neoplasm, myeloid_neoplasm

SEQ ID NO: 475476 - DNA, 28 bp, Homo sapiens
  chr17:40573763-40573791
  hyper
  prostate vs. bladder_and_urothelial,sarcoma,ovary,renal, anorectal,head_and_neck,lung,cervical,uterine,colorectal, thyroid,myeloid_neoplasm
cgccagcctcctcccgccggctgcgctg

SEQ ID NO: 475477 - DNA, 213 bp, Homo sapiens
  chr17:40573874-40574087
  hyper
  prostate vs. bladder_and_urothelial,sarcoma,ovary,renal, anorectal,head_and_neck,lung,cervical,uterine,colorectal, thyroid,myeloid_neoplasm
ctgtccacccactccaccagcccctcttgcactcctgacgcccactcttccccgcccagccccgcccgcttccaggaggcccagggtgccagcgcgccgcgggtgagggtgtcctcaagggcctgaaaatgcctggtggccaggagcagagagcagcgaggggacaggggtgggccgccgaggccgatgtgggggcgcgggggcgcagggtct

SEQ ID NO: 475478 - DNA, 63 bp, Homo sapiens
  chr17:42402710-42402773
  hyper
  prostate vs. ovary,lymphoid_neoplasm,multiple_myeloma, thyroid,myeloid_neoplasm,anorectal,cervical,head_and_neck,lung, non_cancer,colorectal,upper_gi,uterine
cgtgagccgccgcgccggccttaacagcgcattttcaccagccccgccccggccgcgcgcggc

SEQ ID NO: 475479 - DNA, 192 bp, Homo sapiens; identical to SEQ ID NO: 347435
  chr17:42402917-42403109
  hyper
  prostate vs. ovary,lymphoid_neoplasm,multiple_myeloma, thyroid,myeloid_neoplasm,anorectal,cervical,head_and_neck,lung, non_cancer,colorectal,upper_gi,uterine

SEQ ID NO: 475480 - DNA, 325 bp, Homo sapiens; identical to SEQ ID NO: 455784
  chr17:46829655-46829980
  hyper
  prostate vs. thyroid,non_cancer,anorectal, multiple_myeloma,myeloid_neoplasm

SEQ ID NO: 475481 - DNA, 106 bp, Homo sapiens; identical to SEQ ID NO: 455785
  chr17:46829874-46829980
  hyper
  prostate vs. thyroid,non_cancer,myeloid_neoplasm, anorectal,multiple_myeloma

SEQ ID NO: 475482 - DNA, 45 bp, Homo sapiens; identical to SEQ ID NO: 351976
  chr17:46830655-46830700
  hyper
  prostate vs. thyroid,non_cancer,myeloid_neoplasm, anorectal,multiple_myeloma

SEQ ID NO: 475483 - DNA, 132 bp, Homo sapiens; identical to SEQ ID NO: 455788
  chr17:46831595-46831727
  hyper
  prostate vs. multiple_myeloma,thyroid,myeloid_neoplasm, non_cancer

SEQ ID NO: 475484 - DNA, 55 bp, Homo sapiens; identical to SEQ ID NO: 351978
  chr17:46832887-46832942
  hyper
  prostate vs. multiple_myeloma,myeloid_neoplasm,thyroid, non_cancer

SEQ ID NO: 475485 - DNA, 17 bp, Homo sapiens
  chr17:48503155-48503172
  hyper
  prostate vs. upper_gi
cgcttcgcgcctgctcc

SEQ ID NO: 475486 - DNA, 205 bp, Homo sapiens; identical to SEQ ID NO: 374201
  chr17:48503201-48503406
  hyper
  prostate vs. upper_gi

SEQ ID NO: 475487 - DNA, 267 bp, Homo sapiens; identical to SEQ ID NO: 374206
  chr17:49008887-49009154
  hyper
  prostate vs. pancreas_gallbladder

SEQ ID NO: 475488 - DNA, 111 bp, Homo sapiens; identical to SEQ ID NO: 361098
  chr17:53343657-53343768
  hyper
  prostate vs. bladder_and_urothelial

SEQ ID NO: 475489 - DNA, 80 bp, Homo sapiens; identical to SEQ ID NO: 455791
  chr17:58498618-58498698
  hyper
  prostate vs. anorectal,thyroid,non_cancer, myeloid_neoplasm

SEQ ID NO: 475490 - DNA, 41 bp, Homo sapiens; identical to SEQ ID NO: 468883
  chr17:60885408-60885449
  hyper
  prostate vs. uterine,colorectal

SEQ ID NO: 475491 - DNA, 308 bp, Homo sapiens; identical to SEQ ID NO: 347460
  chr17:60885548-60885856
  hyper
  prostate vs. uterine,colorectal

SEQ ID NO: 475492 - DNA, 104 bp, Homo sapiens; identical to SEQ ID NO: 361115
  chr17:61553834-61553938
  hyper
  prostate vs. colorectal,uterine

SEQ ID NO: 475493 - DNA, 48 bp, Homo sapiens
  chr17:61553940-61553988
  hyper
  prostate vs. colorectal,uterine
cgtccccgcccctcgaccatggcctggtgaagaagccggccaggcccg

SEQ ID NO: 475494 - DNA, 322 bp, Homo sapiens; identical to SEQ ID NO: 361117
  chr17:61554094-61554416
  hyper
  prostate vs. colorectal,uterine

SEQ ID NO: 475495 - DNA, 112 bp, Homo sapiens; identical to SEQ ID NO: 454237
  chr17:61777761-61777873
  hyper
  prostate vs. cervical

SEQ ID NO: 475496 - DNA, 76 bp, Homo sapiens; identical to SEQ ID NO: 345537
  chr17:61778423-61778499
  hyper
  prostate vs. cervical

SEQ ID NO: 475497 - DNA, 497 bp, Homo sapiens; identical to SEQ ID NO: 335663
  chr17:72209877-72210374
  hyper
  prostate vs. ovary,anorectal

SEQ ID NO: 475498 - DNA, 952 bp, Homo sapiens; identical to SEQ ID NO: 352018
  chr17:73029792-73030744
  hyper
  prostate vs. liver_bileduct,uterine,pancreas_gallbladder, melanoma,upper_gi,anorectal,multiple_myeloma,breast

SEQ ID NO: 475499 - DNA, 959 bp, Homo sapiens
  chr17:73030252-73031211
  hyper
  prostate vs. pancreas_gallbladder,uterine,colorectal, upper_gi,cervical,melanoma,anorectal,lymphoid_neoplasm
cgtccgggtagggccccacaatttcgaagctggggaaactcgtaagaataaagttgcccaaagggttcccaggacaccccagctccacctggcggggcagccccggagaaccagaggtaaatgaccaccgcgactgcaaacagagggtcctgcaagagaaggcgaggggcgcaaacagggcagaggcaagcaggtagcgggcaggtggtggtggattctgaggtctctggctgccggcaccaaaagaaaccttgcgagcacagcccctctcgacaccccaggtgggactcgaacccacaatccctggcttaggaggccagtgccttatccattaggccactggggcgcggtaagacgctaaacccacgtgctccttgataggtgttcaaccatagtgcccaaacacggccctgctgtgggtcaccgcgctccaagcctgagaagccatggggacgacaggatgaaccgctggctgggcgcggcgtccccaccgggctacacaagagctccatgcggtgacgacgcgcggggaccaggagcccgcggtgccctgtaaccccgagaagaagtgctcggcgagcgcagaggccggtggagcatagctgggaggaatagggatggacgagggcggagggaagaacaaaccctcaaactatgctgggattcgggcaagggctgctcgctccaaaagagcccgaccacaaaggaaccctcaatcttatgatctgacgtcagacgcctcatcccttaggccacgcggtcgcaattcccagggaggctcagagactagtccaggtgccgctccgctcgggggtgactaggcgggcggctggggccagaggaagggtgagcgcttcgctcaacaggcggccagggtgcgagcagtgaagctgcggcacgccggagcgtttaatggccatcaaattggcctctctaggaggtagctgcagccggagacc

SEQ ID NO: 475500 - DNA, 81 bp, Homo sapiens; identical to SEQ ID NO: 454240
  chr17:73584287-73584368
  hyper
  prostate vs. cervical

SEQ ID NO: 475501 - DNA, 170 bp, Homo sapiens; identical to SEQ ID NO: 352021
  chr17:73584951-73585121
  hyper
  prostate vs. cervical

SEQ ID NO: 475502 - DNA, 92 bp, Homo sapiens; identical to SEQ ID NO: 455801
  chr17:74965156-74965248
  hyper
  prostate vs. ovary,uterine

SEQ ID NO: 475503 - DNA, 3 bp, Homo sapiens
  chr17:74965753-74965756
  hyper
  prostate vs. ovary,uterine
ccc

SEQ ID NO: 475504 - DNA, 192 bp, Homo sapiens; identical to SEQ ID NO: 335693
  chr17:76355660-76355852
  hyper
  prostate vs. upper_gi,breast,lung,colorectal,ovary, pancreas_gallbladder,uterine,renal,head_and_neck

SEQ ID NO: 475505 - DNA, 360 bp, Homo sapiens; identical to SEQ ID NO: 335694
  chr17:76588327-76588687
  hyper
  prostate vs. melanoma,colorectal

SEQ ID NO: 475506 - DNA, 33 bp, Homo sapiens
  chr17:77020165-77020198
  hyper
  prostate vs. upper_gi
cgcggcgcggggcacacacggttaatcctccgc

SEQ ID NO: 475507 - DNA, 83 bp, Homo sapiens; identical to SEQ ID NO: 292767
  chr17:77020426-77020509
  hyper
  prostate vs. upper_gi

SEQ ID NO: 475508 - DNA, 180 bp, Homo sapiens
  chr17:77786288-77786468
  hyper
  prostate vs. breast,anorectal
cggccggcccggcccgctggggcctgggttcctttgggttggggaagtgggggtacgaacccacgcggctgtgccaaggggtcccaactccggagtccaaccccacccaccagtcctctgtgcgcacttttcgtttatttctcagcagtctcagtcctggagctcctggggcgatttcgt

SEQ ID NO: 475509 - DNA, 61 bp, Homo sapiens; identical to SEQ ID NO: 352032
  chr17:77786805-77786866
  hyper
  prostate vs. breast,anorectal

SEQ ID NO: 475510 - DNA, 278 bp, Homo sapiens; identical to SEQ ID NO: 462576
  chr17:81038567-81038845
  hyper
  prostate vs. bladder_and_urothelial,ovary

SEQ ID NO: 475511 - DNA, 508 bp, Homo sapiens; identical to SEQ ID NO: 352045
  chr17:81038865-81039373
  hyper
  prostate vs. bladder_and_urothelial,ovary

SEQ ID NO: 475512 - DNA, 3 bp, Homo sapiens
  chr18:9708731-9708734
  hyper
  prostate vs. cervical,anorectal,non_cancer,breast, thyroid,bladder_and_urothelial
cgg

SEQ ID NO: 475513 - DNA, 202 bp, Homo sapiens; identical to SEQ ID NO: 352061
  chr18:9709406-9709608
  hyper
  prostate vs. cervical,anorectal,non_cancer,breast, thyroid,bladder_and_urothelial

SEQ ID NO: 475514 - DNA, 563 bp, Homo sapiens; identical to SEQ ID NO: 345541
  chr18:11947488-11948051
  hyper
  prostate vs. renal,anorectal,cervical,thyroid, myeloid_neoplasm,colorectal,upper_gi,pancreas_gallbladder, multiple_myeloma,non_cancer,head_and_neck, bladder_and_urothelial

SEQ ID NO: 475515 - DNA, 459 bp, Homo sapiens
  chr18:20716114-20716573
  hyper
  prostate vs. upper_gi,breast,ovary
cggggttagccgctgggtccggcccctgcctcccacagccctcgtcgctgccgcccttgattcctggcggccatgcgaccgtgtccggccccggggtggcgcgggggttcgcgagtcccctgggcgccggccgggcgtcgggggagcagtggcagccgccccggccggcgcctctcgccgcctgtgcccaactgcagctgctcgacgggtccggggccgccgggcaggaggagttggaggaggacgatgcctttatcagcgtgcaggtgccggcggccgcctttttgggctccgggacccccgggagtgggagcggcagtcggggacgcctcaactcgttcactcagggaatcctgcccatcgccttctccaggccgacttcgcagaactactgctccctggagcagccaggccagggcggcagcaccagcgccttcgagcagctgcagaggtcccggt

SEQ ID NO: 475516 - DNA, 186 bp, Homo sapiens; identical to SEQ ID NO: 361221
  chr18:20716690-20716876
  hyper
  prostate vs. upper_gi,breast,ovary

SEQ ID NO: 475517 - DNA, 196 bp, Homo sapiens; identical to SEQ ID NO: 452964
  chr18:47339411-47339607
  hyper
  prostate vs. pancreas_gallbladder,colorectal, liver_bileduct,multiple_myeloma,upper_gi,renal,non_cancer

SEQ ID NO: 475518 - DNA, 401 bp, Homo sapiens; identical to SEQ ID NO: 452965
  chr18:47339758-47340159
  hyper
  prostate vs. pancreas_gallbladder,colorectal, liver_bileduct,multiple_myeloma,upper_gi,renal,non_cancer

SEQ ID NO: 475519 - DNA, 79 bp, Homo sapiens
  chr18:59560090-59560169
  hyper
  prostate vs. breast,pancreas_gallbladder, myeloid_neoplasm
cgtttaggaggcaagaggctgacaggcaggaaacacaattgagactgagctttcttcagcctgcagtgaaatacatgca

SEQ ID NO: 475520 - DNA, 297 bp, Homo sapiens
  chr18:59560572-59560869
  hyper
  prostate vs. breast,pancreas_gallbladder, myeloid_neoplasm
cgtttgcccctgtccgccacctcatcaagtcaccgccacctcatcaagtcaccgtcacctcatcaagtcaccgtcactctgctttggcgatttctctactctctccagacccaggcagcgctccccaagccatgccccgaccccaggcgggattggggaccgccgcttcccgagcagcgccccacgagtccagctggctttgtcctgccgctgtccttccaggagcaagcgccccaggcgcgtgtgtctgcacaaaagacccccaacatctggcccttcacagcgctctctaatccc

SEQ ID NO: 475521 - DNA, 649 bp, Homo sapiens; identical to SEQ ID NO: 361304
  chr18:59560572-59561221
  hyper
  prostate vs. liver_bileduct,breast,cervical,sarcoma

SEQ ID NO: 475522 - DNA, 101 bp, Homo sapiens; identical to SEQ ID NO: 454266
  chr18:60985398-60985499
  hyper
  prostate vs. myeloid_neoplasm,thyroid,melanoma

SEQ ID NO: 475523 - DNA, 75 bp, Homo sapiens; identical to SEQ ID NO: 347516
  chr18:60985973-60986048
  hyper
  prostate vs. myeloid_neoplasm,thyroid,melanoma

SEQ ID NO: 475524 - DNA, 15 bp, Homo sapiens
  chr19:1856948-1856963
  hyper
  prostate vs. colorectal,multiple_myeloma, myeloid_neoplasm,thyroid,non_cancer
cggggtggggggggc

SEQ ID NO: 475525 - DNA, 109 bp, Homo sapiens; identical to SEQ ID NO: 345559
  chr19:1857456-1857565
  hyper
  prostate vs. colorectal,multiple_myeloma, myeloid_neoplasm,thyroid,non_cancer

SEQ ID NO: 475526 - DNA, 116 bp, Homo sapiens; identical to SEQ ID NO: 345560
  chr19:1979018-1979134
  hyper
  prostate vs. lymphoid_neoplasm,melanoma,renal

SEQ ID NO: 475527 - DNA, 18 bp, Homo sapiens
  chr19:2488431-2488449
  hyper
  prostate vs. thyroid
cgtgaagagcgctgcggg

SEQ ID NO: 475528 - DNA, 435 bp, Homo sapiens; identical to SEQ ID NO: 361375
  chr19:2488689-2489124
  hyper
  prostate vs. thyroid

SEQ ID NO: 475529 - DNA, 439 bp, Homo sapiens
  chr19:5608081-5608520
  hyper
  prostate vs. sarcoma,melanoma
cgccctggaggctctgcatacttcagtcaagtagctgagtggtgtcctgcccctctggccttcctacgtccttctgtttttgtccagagctgagccccacaggtaaggccaactctgtcactcacgcctcagctgaatgtcacttcttcagcgagctctgctgaagctgcctcccaaatctaaacacggcctccccaacacactgacggcgtgctctaatattccttaatacgctcatcacaacacatcatatgtgtttatttcttaaatggtctttttcccgccagactaaaaaatctgtgatgacagtgaccacgtatgtttacctctgcttaatcatcagtgtccgagtgaagtcaacaaagtaactgaataaacaggttattcatggctataagaatttcctaagcccttgctgaacacacagactgttcagaga

SEQ ID NO: 475530 - DNA, 212 bp, Homo sapiens; identical to SEQ ID NO: 455816
  chr19:10197461-10197673
  hyper
  prostate vs. multiple_myeloma,bladder_and_urothelial, cervical,anorectal,non_cancer,thyroid,myeloid_neoplasm,upper_gi, renal

SEQ ID NO: 475531 - DNA, 4 bp, Homo sapiens
  chr19:10197819-10197823
  hyper
  prostate vs. multiple_myeloma,bladder_and_urothelial, cervical,anorectal,non_cancer,thyroid,myeloid_neoplasm,upper_gi, renal
cccc

SEQ ID NO: 475532 - DNA, 24 bp, Homo sapiens
  chr19:10397603-10397627
  hyper
  prostate vs. myeloid_neoplasm,thyroid,multiple_myeloma
cgaggaggcggggctgcgggcctc

SEQ ID NO: 475533 - DNA, 164 bp, Homo sapiens; identical to SEQ ID NO: 455819
  chr19:11529251-11529415
  hyper
  prostate vs. thyroid,renal

SEQ ID NO: 475534 - DNA, 51 bp, Homo sapiens; identical to SEQ ID NO: 473943
  chr19:11531278-11531329
  hyper
  prostate vs. cervical,thyroid,ovary,myeloid_neoplasm, multiple_myeloma,non_cancer,sarcoma,uterine,breast

SEQ ID NO: 475535 - DNA, 38 bp, Homo sapiens; identical to SEQ ID NO: 473944
  chr19:11531888-11531926
  hyper
  prostate vs. cervical,thyroid,ovary,myeloid_neoplasm, multiple_myeloma,non_cancer,sarcoma,uterine,breast

SEQ ID NO: 475536 - DNA, 58 bp, Homo sapiens
  chr19:11689628-11689686
  hyper
  prostate vs. myeloid_neoplasm
acccctcccacggggccgcccgcatctcacctgccgtcgcggggcgggcgttgcggcc

SEQ ID NO: 475537 - DNA, 610 bp, Homo sapiens; identical to SEQ ID NO: 335981
  chr19:12900128-12900738
  hyper
  prostate vs. upper_gi,pancreas_gallbladder, liver_bileduct,head_and_neck,breast,colorectal

SEQ ID NO: 475538 - DNA, 857 bp, Homo sapiens
  chr19:13265772-13266629
  hyper
  prostate vs. upper_gi,breast,colorectal
cgtcaggggctggcagccgctcgctggggccccaagaaccggtctgaccggttaccacgtgggcgagagagggttgggcccccttttccttgcccgggcattccctaactggtggagccccgcctcccccagatttgggggttcccttgaaattgtcctacaactccgggacagggagatcggggctttctgagttgagacaatagtgctaaacacactgccccaagcggagctggggatcgattgcacgcactttgaagccttgaaaggtggtagatctcgcccccaccccctagaccaaactgaatcagctgtggccggggccctacagtatcaggtggagctgagcgggtgagctttgaagggctctttagtccccagttcccgtatcttcctcgaggaatcgttgtgtgtctcaggcagggacgtgcagcctcagtttcctcatctgtgaaatgggcctctaagcagcttctccacccggcattaggtttttaaaaatgcccattagagccctagttattttcttgggtcactccccagctctagaataaccaccccgaaacgagaaagccctttcaatataccccacgtaggtttaagagtggggttgtgggcgttgccccagggcgaagggagggggcctgtcgggaagacaaaggagtcgcaggtgcggggagtggtggcggcggcaggcgccgggaaagcgctcgccccgccccgccgacggctggctctgccgccgcaggcttcccatgaccccaggggaactgaccccgtggccacagggtagaaggaggggcaagccggcctcagaacgtctgctggtggaatctgggagctttggctcccctccc

SEQ ID NO: 475539 - DNA, 872 bp, Homo sapiens
  chr19:13266157-13267029
  hyper
  prostate vs. lymphoid_neoplasm,multiple_myeloma, myeloid_neoplasm,anorectal,breast,non_cancer,uterine,upper_gi
cgtatcttcctcgaggaatcgttgtgtgtctcaggcagggacgtgcagcctcagtttcctcatctgtgaaatgggcctctaagcagcttctccacccggcattaggtttttaaaaatgcccattagagccctagttattttcttgggtcactccccagctctagaataaccaccccgaaacgagaaagccctttcaatataccccacgtaggtttaagagtggggttgtgggcgttgccccagggcgaagggagggggcctgtcgggaagacaaaggagtcgcaggtgcggggagtggtggcggcggcaggcgccgggaaagcgctcgccccgccccgccgacggctggctctgccgccgcaggcttcccatgaccccaggggaactgaccccgtggccacagggtagaaggaggggcaagccggcctcagaacgtctgctggtggaatctgggagctttggctcccctcccgcccaacccacaccccctttcctctcctgtgtggattgtgaaggagagcttctcaccgttctccagccaagctcgcccccacggctgcctgattccttcctgggaacacgtggggggacttttaaaaggcgccacctactccgagtcctgacccacccaactctcccaggggacgtgggggcactggagccccacaccgcaggcggtagctcaatgcacccgcgtcggagttcctcccccgcgagcgtggcaaggctcagggaagtcccgggcccctggggagggggccttgccgcgcatcctgtcgcaggaaccgccgggcccttccttccgcgggaagcggcttggccgacccccgcccccgcccgggcctcttgggggtttccggtgcccggccacc

SEQ ID NO: 475540 - DNA, 324 bp, Homo sapiens; identical to SEQ ID NO: 335997
  chr19:15235629-15235953
  hyper
  prostate vs. colorectal,bladder_and_urothelial, multiple_myeloma,sarcoma,pancreas_gallbladder,renal,cervical, upper_gi,uterine,anorectal,liver_bileduct,non_cancer,ovary, myeloid_neoplasm,thyroid,lung,lymphoid_neoplasm

SEQ ID NO: 475541 - DNA, 162 bp, Homo sapiens; identical to SEQ ID NO: 454282
  chr19:16186802-16186964
  hyper
  prostate vs. lung,sarcoma,lymphoid_neoplasm,non_cancer, anorectal,renal,multiple_myeloma,myeloid_neoplasm,thyroid, uterine,ovary,cervical,head_and_neck,melanoma,colorectal, liver_bileduct

SEQ ID NO: 475542 - DNA, 102 bp, Homo sapiens; identical to SEQ ID NO: 205249
  chr19:16187000-16187102
  hyper
  prostate vs. lung,sarcoma,lymphoid_neoplasm,non_cancer, anorectal,renal,multiple_myeloma,myeloid_neoplasm,thyroid, uterine,ovary,cervical,head_and_neck,melanoma,colorectal, liver_bileduct

SEQ ID NO: 475543 - DNA, 517 bp, Homo sapiens; identical to SEQ ID NO: 454284
  chr19:16187104-16187621
  hyper
  prostate vs. lung,sarcoma,lymphoid_neoplasm,non_cancer, anorectal,renal,multiple_myeloma,myeloid_neoplasm,thyroid, uterine,ovary,cervical,head_and_neck,melanoma,colorectal, liver_bileduct

SEQ ID NO: 475544 - DNA, 148 bp, Homo sapiens; identical to SEQ ID NO: 454285
  chr19:16187640-16187788
  hyper
  prostate vs. lung,sarcoma,lymphoid_neoplasm,non_cancer, anorectal,renal,multiple_myeloma,myeloid_neoplasm,thyroid, uterine,ovary,cervical,head_and_neck,melanoma,colorectal, liver_bileduct

SEQ ID NO: 475545 - DNA, 329 bp, Homo sapiens; identical to SEQ ID NO: 454286
  chr19:16187292-16187621
  hyper
  prostate vs. lymphoid_neoplasm,lung,sarcoma, myeloid_neoplasm,anorectal,melanoma,non_cancer,thyroid, head_and_neck,multiple_myeloma,renal,ovary,uterine,cervical, bladder_and_urothelial,colorectal,upper_gi,liver_bileduct,
  CONT. FROM ABOVE: breast

SEQ ID NO: 475546 - DNA, 634 bp, Homo sapiens; identical to SEQ ID NO: 345579
  chr19:16187640-16188274
  hyper
  prostate vs. lymphoid_neoplasm,lung,sarcoma, myeloid_neoplasm,anorectal,melanoma,non_cancer,thyroid, head_and_neck,multiple_myeloma,renal,ovary,uterine,cervical, bladder_and_urothelial,colorectal,upper_gi,liver_bileduct,
  CONT. FROM ABOVE: breast

SEQ ID NO: 475547 - DNA, 215 bp, Homo sapiens; identical to SEQ ID NO: 455834
  chr19:17008145-17008360
  hyper
  prostate vs. cervical

SEQ ID NO: 475548 - DNA, 31 bp, Homo sapiens; identical to SEQ ID NO: 55797
  chr19:17008820-17008851
  hyper
  prostate vs. cervical

SEQ ID NO: 475549 - DNA, 133 bp, Homo sapiens; identical to SEQ ID NO: 455836
  chr19:17958343-17958476
  hyper
  prostate vs. lymphoid_neoplasm,multiple_myeloma, non_cancer,thyroid

SEQ ID NO: 475550 - DNA, 557 bp, Homo sapiens
  chr19:34310910-34311467
  hyper
  prostate vs. bladder_and_urothelial,multiple_myeloma, colorectal,cervical,uterine
cggttcagggcccccgaggaagctgcggtttggggcgagccgattgcaccagcagggccgggctgctgctcccggggctgacgcgggccacgccctcctggacgcggacacacccccatttccccgggcccacagagccacgcctggccctgcagccaaacagcgggaaggcagattggtacgagtaggtacaaggccctggaattctcgcccggttgccacacactgcacggagcataattgggggaggttgtgcaactgcccgggaagccggggctcgcaacgagggctctctccaagtccccatcacaggcctccggggagcctcgggacagagcctgacgccaccttcgggtgacatcgatggcctcgctctggcagaggagtagtgtggctctgccgagaactggggagcccgggtccccgcagggccaaggggagggagggctggcggaaggggccgcgcccacagccccaggtggcagcagcggcggtggcggtcccgactggcagagcctaacgagaacagggcctatccccaggggccccgggctgga

SEQ ID NO: 475551 - DNA, 66 bp, Homo sapiens; identical to SEQ ID NO: 352283
  chr19:34311498-34311564
  hyper
  prostate vs. bladder_and_urothelial,multiple_myeloma, colorectal,cervical,uterine

SEQ ID NO: 475552 - DNA, 68 bp, Homo sapiens; identical to SEQ ID NO: 336081
  chr19:35169531-35169599
  hyper
  prostate vs. renal,sarcoma

SEQ ID NO: 475553 - DNA, 296 bp, Homo sapiens; identical to SEQ ID NO: 455842
  chr19:38701255-38701551
  hyper
  prostate vs. multiple_myeloma,thyroid,non_cancer

SEQ ID NO: 475554 - DNA, 116 bp, Homo sapiens; identical to SEQ ID NO: 455843
  chr19:38701435-38701551
  hyper
  prostate vs. multiple_myeloma

SEQ ID NO: 475555 - DNA, 31 bp, Homo sapiens; identical to SEQ ID NO: 352303
  chr19:38702212-38702243
  hyper
  prostate vs. multiple_myeloma

SEQ ID NO: 475556 - DNA, 555 bp, Homo sapiens; identical to SEQ ID NO: 336165
  chr19:45579321-45579876
  hyper
  prostate vs. upper_gi,breast,colorectal, bladder_and_urothelial,lung,pancreas_gallbladder, multiple_myeloma,head_and_neck,lymphoid_neoplasm

SEQ ID NO: 475557 - DNA, 3 bp, Homo sapiens
  chr19:45655296-45655299
  hyper
  prostate vs. anorectal
cgg

SEQ ID NO: 475558 - DNA, 4 bp, Homo sapiens
  chr19:46379840-46379844
  hyper
  prostate vs. myeloid_neoplasm,non_cancer, multiple_myeloma,pancreas_gallbladder
cgcc

SEQ ID NO: 475559 - DNA, 89 bp, Homo sapiens; identical to SEQ ID NO: 454300
  chr19:46519167-46519256
  hyper
  prostate vs. anorectal,cervical

SEQ ID NO: 475560 - DNA, 421 bp, Homo sapiens; identical to SEQ ID NO: 352340
  chr19:46519582-46520003
  hyper
  prostate vs. anorectal,cervical

SEQ ID NO: 475561 - DNA, 287 bp, Homo sapiens
  chr19:47729538-47729825
  hyper
  prostate vs. breast,bladder_and_urothelial,lung,melanoma, upper_gi
cggccgcgggccacgggcgcgcagctccactcctcggcggcctagtccctggccctggccctggccctggctcgggctccggctatgccagccgcggcgcggagtccttgggcggctctgcgggcgcgcgattcccccccacccacttaccccccacctgcctgtccgcggagcgacccagccgcgcagggcagcagctgccgcacatctggcgggggccgcctgccgccccctcctccggcggaagtcccacctgccgtctaccccacccccagcactcacccgcc

SEQ ID NO: 475562 - DNA, 681 bp, Homo sapiens; identical to SEQ ID NO: 361653
  chr19:47729850-47730531
  hyper
  prostate vs. breast,bladder_and_urothelial,lung,melanoma, upper_gi

SEQ ID NO: 475563 - DNA, 287 bp, Homo sapiens; identical to SEQ ID NO: 336192
  chr19:47731303-47731590
  hyper
  prostate vs. upper_gi,lung,colorectal, bladder_and_urothelial,ovary,renal,breast

SEQ ID NO: 475564 - DNA, 480 bp, Homo sapiens; identical to SEQ ID NO: 336204
  chr19:49199703-49200183
  hyper
  prostate vs. pancreas_gallbladder,head_and_neck,upper_gi, lung,bladder_and_urothelial,cervical,multiple_myeloma

SEQ ID NO: 475565 - DNA, 550 bp, Homo sapiens; identical to SEQ ID NO: 336209
  chr19:49467064-49467614
  hyper
  prostate vs. upper_gi,colorectal,renal, pancreas_gallbladder,cervical,lymphoid_neoplasm, bladder_and_urothelial,anorectal

SEQ ID NO: 475566 - DNA, 186 bp, Homo sapiens; identical to SEQ ID NO: 336235
  chr19:51324279-51324465
  hyper
  prostate vs. pancreas_gallbladder,colorectal, bladder_and_urothelial,ovary,renal,upper_gi,uterine, multiple_myeloma

SEQ ID NO: 475567 - DNA, 96 bp, Homo sapiens; identical to SEQ ID NO: 345606
  chr19:51416002-51416098
  hyper
  prostate vs. bladder_and_urothelial,pancreas_gallbladder, sarcoma,upper_gi,breast,colorectal,non_cancer,cervical, liver_bileduct,anorectal,renal,head_and_neck,thyroid,lung, uterine,myeloid_neoplasm,multiple_myeloma,ovary

SEQ ID NO: 475568 - DNA, 241 bp, Homo sapiens
  chr19:51416100-51416341
  hyper
  prostate vs. bladder_and_urothelial,pancreas_gallbladder, sarcoma,upper_gi,breast,colorectal,non_cancer,cervical, liver_bileduct,anorectal,renal,head_and_neck,thyroid,lung, uterine,myeloid_neoplasm,multiple_myeloma,ovary
ggtcaggactgccgagaaacagcggggactcatcaggggagaggtggtgtttacagccacgaggccgggtgagatcatccaaggagtgggtgggtgtagaccgcggagccggcgcgggtgagggatagtgcccgcaggtgaccgcgacgaggcaggaatgtctctgtgtctctctgtctctcctgggtctctaacactctttccttctccttccttacttctttcccccacagcccacccc

SEQ ID NO: 475569 - DNA, 13 bp, Homo sapiens
  chr19:51521986-51521999
  hyper
  prostate vs. breast,ovary,anorectal,head_and_neck, liver_bileduct,colorectal,myeloid_neoplasm, bladder_and_urothelial,multiple_myeloma,lung,uterine,sarcoma, renal
cggtagtgtaaaa

SEQ ID NO: 475570 - DNA, 242 bp, Homo sapiens
  chr19:51522935-51523177
  hyper
  prostate vs. anorectal,myeloid_neoplasm,colorectal,ovary, breast,sarcoma,lung,uterine,upper_gi,bladder_and_urothelial, head_and_neck
cctgtggtctgccgctggtatcctctgcccagggacccctggcgggaccttcccttttaaccccaaggagtccggaagcttctccaccctcccctacccccacccccgggctccctccctttccctctgtctaattgtaccgtgggtgaggctggcactcctgggtcccagattcctgctctgggaggggccctggaatacaggcttctcccagtgcccgaaacgcccccttttcatccctt

SEQ ID NO: 475571 - DNA, 36 bp, Homo sapiens
  chr19:51568027-51568063
  hyper
  prostate vs. multiple_myeloma,uterine
cgcgggaggggctgctgcgagggtattttgggaggt

SEQ ID NO: 475572 - DNA, 538 bp, Homo sapiens; identical to SEQ ID NO: 352438
  chr19:59049765-59050303
  hyper
  prostate vs. head_and_neck,ovary,cervical,uterine, colorectal

SEQ ID NO: 475573 - DNA, 185 bp, Homo sapiens; identical to SEQ ID NO: 459562
  chr2:12857960-12858145
  hyper
  prostate vs. cervical,thyroid

SEQ ID NO: 475574 - DNA, 1 bp, Homo sapiens
  chr2:12858681-12858682
  hyper
  prostate vs. cervical,thyroid
c

SEQ ID NO: 475575 - DNA, 460 bp, Homo sapiens; identical to SEQ ID NO: 331212
  chr2:17699502-17699962
  hyper
  prostate vs. colorectal,uterine,head_and_neck,ovary, anorectal,bladder_and_urothelial,non_cancer,upper_gi

SEQ ID NO: 475576 - DNA, 5 bp, Homo sapiens
  chr2:20068485-20068490
  hyper
  prostate vs. multiple_myeloma,myeloid_neoplasm,thyroid
cggat

SEQ ID NO: 475577 - DNA, 511 bp, Homo sapiens; identical to SEQ ID NO: 453094
  chr2:21022197-21022708
  hyper
  prostate vs. renal,liver_bileduct,sarcoma,thyroid, lymphoid_neoplasm,pancreas_gallbladder,myeloid_neoplasm, colorectal,multiple_myeloma,non_cancer,bladder_and_urothelial, upper_gi,lung,melanoma,breast

SEQ ID NO: 475578 - DNA, 80 bp, Homo sapiens; identical to SEQ ID NO: 464390
  chr2:26521880-26521960
  hyper
  prostate vs. anorectal,cervical

SEQ ID NO: 475579 - DNA, 374 bp, Homo sapiens; identical to SEQ ID NO: 349476
  chr2:26522127-26522501
  hyper
  prostate vs. anorectal,cervical

SEQ ID NO: 475580 - DNA, 17 bp, Homo sapiens
  chr2:27484883-27484900
  hyper
  prostate vs. uterine
cggacggtcagccgaca

SEQ ID NO: 475581 - DNA, 59 bp, Homo sapiens; identical to SEQ ID NO: 455879
  chr2:27938267-27938326
  hyper
  prostate vs. ovary,sarcoma,non_cancer

SEQ ID NO: 475582 - DNA, 22 bp, Homo sapiens
  chr2:29337909-29337931
  hyper
  prostate vs. anorectal,cervical
cgtgggtgtagcacggattagg

SEQ ID NO: 475583 - DNA, 38 bp, Homo sapiens; identical to SEQ ID NO: 454314
  chr2:30453530-30453568
  hyper
  prostate vs. myeloid_neoplasm,non_cancer,thyroid,ovary

SEQ ID NO: 475584 - DNA, 64 bp, Homo sapiens; identical to SEQ ID NO: 454317
  chr2:43019535-43019599
  hyper
  prostate vs. cervical,sarcoma,anorectal,myeloid_neoplasm, non_cancer,thyroid

SEQ ID NO: 475585 - DNA, 70 bp, Homo sapiens; identical to SEQ ID NO: 346432
  chr2:43020503-43020573
  hyper
  prostate vs. cervical,anorectal,myeloid_neoplasm,thyroid, sarcoma,non_cancer

SEQ ID NO: 475586 - DNA, 395 bp, Homo sapiens; identical to SEQ ID NO: 345010
  chr2:43452443-43452838
  hyper
  prostate vs. pancreas_gallbladder,melanoma,upper_gi, colorectal,breast,liver_bileduct,uterine,non_cancer, myeloid_neoplasm

SEQ ID NO: 475587 - DNA, 73 bp, Homo sapiens; identical to SEQ ID NO: 331292
  chr2:47656947-47657020
  hyper
  prostate vs. colorectal,upper_gi

SEQ ID NO: 475588 - DNA, 61 bp, Homo sapiens; identical to SEQ ID NO: 455886
  chr2:56149749-56149810
  hyper
  prostate vs. bladder_and_urothelial,multiple_myeloma, ovary

SEQ ID NO: 475589 - DNA, 90 bp, Homo sapiens; identical to SEQ ID NO: 455887
  chr2:56150447-56150537
  hyper
  prostate vs. bladder_and_urothelial,multiple_myeloma, ovary

SEQ ID NO: 475590 - DNA, 18 bp, Homo sapiens
  chr2:56150681-56150699
  hyper
  prostate vs. bladder_and_urothelial,multiple_myeloma, ovary
cgaggctgcacacctcca

SEQ ID NO: 475591 - DNA, 90 bp, Homo sapiens; identical to SEQ ID NO: 455887
  chr2:56150447-56150537
  hyper
  prostate vs. bladder_and_urothelial,multiple_myeloma, ovary

SEQ ID NO: 475592 - DNA, 18 bp, Homo sapiens
  chr2:56150681-56150699
  hyper
  prostate vs. bladder_and_urothelial,multiple_myeloma, ovary
cgaggctgcacacctcca

SEQ ID NO: 475593 - DNA, 2 bp, Homo sapiens
  chr2:64836206-64836208
  hyper
  prostate vs. multiple_myeloma,pancreas_gallbladder, uterine,thyroid,myeloid_neoplasm,non_cancer,ovary
cg

SEQ ID NO: 475594 - DNA, 354 bp, Homo sapiens; identical to SEQ ID NO: 331320
  chr2:64994400-64994754
  hyper
  prostate vs. sarcoma,bladder_and_urothelial, multiple_myeloma,myeloid_neoplasm

SEQ ID NO: 475595 - DNA, 413 bp, Homo sapiens; identical to SEQ ID NO: 455891
  chr2:74729488-74729901
  hyper
  prostate vs. liver_bileduct,upper_gi, pancreas_gallbladder,colorectal,melanoma,multiple_myeloma, cervical,uterine,anorectal,non_cancer,renal,thyroid, bladder_and_urothelial

SEQ ID NO: 475596 - DNA, 239 bp, Homo sapiens; identical to SEQ ID NO: 455892
  chr2:74729933-74730172
  hyper
  prostate vs. liver_bileduct,upper_gi, pancreas_gallbladder,colorectal,melanoma,multiple_myeloma, cervical,uterine,anorectal,non_cancer,renal,thyroid, bladder_and_urothelial

SEQ ID NO: 475597 - DNA, 44 bp, Homo sapiens; identical to SEQ ID NO: 455893
  chr2:74729857-74729901
  hyper
  prostate vs. colorectal,cervical,multiple_myeloma, upper_gi,renal,pancreas_gallbladder,melanoma,non_cancer, bladder_and_urothelial,uterine,liver_bileduct,head_and_neck

SEQ ID NO: 475598 - DNA, 239 bp, Homo sapiens; identical to SEQ ID NO: 455892
  chr2:74729933-74730172
  hyper
  prostate vs. colorectal,cervical,multiple_myeloma, upper_gi,renal,pancreas_gallbladder,melanoma,non_cancer, bladder_and_urothelial,uterine,liver_bileduct,head_and_neck

SEQ ID NO: 475599 - DNA, 79 bp, Homo sapiens; identical to SEQ ID NO: 345021
  chr2:74730644-74730723
  hyper
  prostate vs. colorectal,cervical,multiple_myeloma, upper_gi,renal,pancreas_gallbladder,melanoma,non_cancer, bladder_and_urothelial,uterine,liver_bileduct,head_and_neck

SEQ ID NO: 475600 - DNA, 236 bp, Homo sapiens; identical to SEQ ID NO: 453103
  chr2:74781700-74781936
  hyper
  prostate vs. colorectal,myeloid_neoplasm,thyroid,uterine, non_cancer,lymphoid_neoplasm,multiple_myeloma,upper_gi,renal, pancreas_gallbladder

SEQ ID NO: 475601 - DNA, 123 bp, Homo sapiens; identical to SEQ ID NO: 453104
  chr2:74782349-74782472
  hyper
  prostate vs. colorectal,myeloid_neoplasm,thyroid,uterine, non_cancer,lymphoid_neoplasm,multiple_myeloma,upper_gi,renal, pancreas_gallbladder

SEQ ID NO: 475602 - DNA, 59 bp, Homo sapiens; identical to SEQ ID NO: 345026
  chr2:96991316-96991375
  hyper
  prostate vs. multiple_myeloma,non_cancer, myeloid_neoplasm,thyroid

SEQ ID NO: 475603 - DNA, 265 bp, Homo sapiens; identical to SEQ ID NO: 454328
  chr2:111874622-111874887
  hyper
  prostate vs. breast,cervical,head_and_neck,sarcoma, anorectal,myeloid_neoplasm,thyroid,non_cancer

SEQ ID NO: 475604 - DNA, 205 bp, Homo sapiens; identical to SEQ ID NO: 453111
  chr2:111874987-111875192
  hyper
  prostate vs. breast,cervical,head_and_neck,sarcoma, anorectal,myeloid_neoplasm,thyroid,non_cancer

SEQ ID NO: 475605 - DNA, 205 bp, Homo sapiens; identical to SEQ ID NO: 453111
  chr2:111874987-111875192
  hyper
  prostate vs. breast,cervical,multiple_myeloma,sarcoma, anorectal,myeloid_neoplasm,head_and_neck,non_cancer

SEQ ID NO: 475606 - DNA, 138 bp, Homo sapiens; identical to SEQ ID NO: 345036
  chr2:111875611-111875749
  hyper
  prostate vs. breast,cervical,multiple_myeloma,sarcoma, anorectal,myeloid_neoplasm,head_and_neck,non_cancer

SEQ ID NO: 475607 - DNA, 261 bp, Homo sapiens; identical to SEQ ID NO: 466953
  chr2:121200130-121200391
  hyper
  prostate vs. myeloid_neoplasm

SEQ ID NO: 475608 - DNA, 242 bp, Homo sapiens; identical to SEQ ID NO: 474012
  chr2:121200454-121200696
  hyper
  prostate vs. myeloid_neoplasm

SEQ ID NO: 475609 - DNA, 56 bp, Homo sapiens; identical to SEQ ID NO: 349576
  chr2:121200731-121200787
  hyper
  prostate vs. myeloid_neoplasm

SEQ ID NO: 475610 - DNA, 1 bp, Homo sapiens
  chr2:145282267-145282268
  hyper
  prostate vs. melanoma,lymphoid_neoplasm
c

SEQ ID NO: 475611 - DNA, 115 bp, Homo sapiens; identical to SEQ ID NO: 453125
  chr2:149645382-149645497
  hyper
  prostate vs. thyroid,non_cancer,myeloid_neoplasm, multiple_myeloma,ovary

SEQ ID NO: 475612 - DNA, 64 bp, Homo sapiens; identical to SEQ ID NO: 349598
  chr2:149645987-149646051
  hyper
  prostate vs. thyroid,non_cancer,myeloid_neoplasm, multiple_myeloma,ovary

SEQ ID NO: 475613 - DNA, 9 bp, Homo sapiens
  chr2:160760627-160760636
  hyper
  prostate vs. lymphoid_neoplasm,anorectal, myeloid_neoplasm,cervical,non_cancer,upper_gi
cgggaatcg

SEQ ID NO: 475614 - DNA, 362 bp, Homo sapiens; identical to SEQ ID NO: 464430
  chr2:171567970-171568332
  hyper
  prostate vs. ovary

SEQ ID NO: 475615 - DNA, 16 bp, Homo sapiens
  chr2:171568711-171568727
  hyper
  prostate vs. ovary
actgacccccgccccc

SEQ ID NO: 475616 - DNA, 93 bp, Homo sapiens; identical to SEQ ID NO: 464432
  chr2:171568239-171568332
  hyper
  prostate vs. bladder_and_urothelial,ovary

SEQ ID NO: 475617 - DNA, 273 bp, Homo sapiens; identical to SEQ ID NO: 349618
  chr2:171568711-171568984
  hyper
  prostate vs. bladder_and_urothelial,ovary

SEQ ID NO: 475618 - DNA, 121 bp, Homo sapiens
  chr2:171569927-171570048
  hyper
  prostate vs. upper_gi
cgttgggggagaagggggcgtgcgagtgcaggatgtgcgagggacccattgtatttgggtcgcaagcagcccacccgtcttgagtacgatattctcattccgcaggcgcgccctgggcgtg

SEQ ID NO: 475619 - DNA, 116 bp, Homo sapiens; identical to SEQ ID NO: 357375
  chr2:172962017-172962133
  hyper
  prostate vs. anorectal,ovary,bladder_and_urothelial, cervical

SEQ ID NO: 475620 - DNA, 66 bp, Homo sapiens; identical to SEQ ID NO: 357376
  chr2:172964092-172964158
  hyper
  prostate vs. ovary,cervical,uterine

SEQ ID NO: 475621 - DNA, 63 bp, Homo sapiens; identical to SEQ ID NO: 455903
  chr2:172964685-172964748
  hyper
  prostate vs. myeloid_neoplasm

SEQ ID NO: 475622 - DNA, 794 bp, Homo sapiens; identical to SEQ ID NO: 331546
  chr2:178257227-178258021
  hyper
  prostate vs. liver_bileduct,lung,bladder_and_urothelial, colorectal,uterine,renal,pancreas_gallbladder,melanoma,sarcoma, cervical,upper_gi,ovary,anorectal,non_cancer,thyroid, myeloid_neoplasm

SEQ ID NO: 475623 - DNA, 34 bp, Homo sapiens
  chr2:180725139-180725173
  hyper
  prostate vs. multiple_myeloma
cgcacataacagtggcgaaacagatggtcctccc

SEQ ID NO: 475624 - DNA, 34 bp, Homo sapiens; identical to SEQ ID NO: 345053
  chr2:182323095-182323129
  hyper
  prostate vs. thyroid,myeloid_neoplasm

SEQ ID NO: 475625 - DNA, 87 bp, Homo sapiens
  chr2:191044988-191045075
  hyper
  prostate vs. colorectal,pancreas_gallbladder,cervical, renal,ovary,multiple_myeloma,anorectal,uterine,non_cancer,lung, myeloid_neoplasm,bladder_and_urothelial,head_and_neck,upper_gi, sarcoma
cgcagaacccttagctgggaaggccgcggccaggctgcggggccccctgcaggcgggctcagtgccccggcccagcacctgttgtcc

SEQ ID NO: 475626 - DNA, 244 bp, Homo sapiens
  chr2:191045505-191045749
  hyper
  prostate vs. colorectal,pancreas_gallbladder,cervical, renal,ovary,multiple_myeloma,anorectal,uterine,non_cancer,lung, myeloid_neoplasm,bladder_and_urothelial,head_and_neck,upper_gi, sarcoma
cgaggagcgcgcggcgggcgcggcggcgacggcaggaggaggggccgggagcccgggcgccgccgaaggacgccccgtcctccacatgctgccacttggctgagccgggcgccggcgagaaggcggcgccgctgccctggcagctggactgcactttgcccccgcccggcctcagctgccgcccgcccagacgccagcaagcccccctcccacgacagggctgctccgggagcttcggagaccc

SEQ ID NO: 475627 - DNA, 513 bp, Homo sapiens; identical to SEQ ID NO: 345059
  chr2:191045505-191046018
  hyper
  prostate vs. multiple_myeloma,cervical, pancreas_gallbladder,ovary,renal,uterine,non_cancer,anorectal, colorectal,myeloid_neoplasm,lung,upper_gi,head_and_neck, bladder_and_urothelial,sarcoma,melanoma

SEQ ID NO: 475628 - DNA, 171 bp, Homo sapiens; identical to SEQ ID NO: 349657
  chr2:191208170-191208341
  hyper
  prostate vs. bladder_and_urothelial,liver_bileduct, colorectal,upper_gi,pancreas_gallbladder,uterine,head_and_neck, breast,cervical,ovary,lung,anorectal

SEQ ID NO: 475629 - DNA, 361 bp, Homo sapiens; identical to SEQ ID NO: 331567
  chr2:191514839-191515200
  hyper
  prostate vs. head_and_neck,colorectal, bladder_and_urothelial,upper_gi,renal,melanoma,cervical,lung, uterine,multiple_myeloma,anorectal,ovary,breast, pancreas_gallbladder

SEQ ID NO: 475630 - DNA, 833 bp, Homo sapiens
  chr2:219845565-219846398
  hyper
  prostate vs. ovary,bladder_and_urothelial,thyroid
cggaagggagtgaggtgagctggggtcgcctggcagggtgggtatgaggcaaggcggctccctcgggctgagcccaccatccaggcctctcgctgcctgcgggcggcgcccaagcccgcgccaccctccttctcgggacgttttccttggcagttctctgctcaggcccgagatgagcctctccctgctttcccctaaccacgggttctggcgcagcaaagaacagagagagaggaggcagcggagagctcaggagctttaatggggctgaaagggtcagaaacacaccgggagtttctcctgggagtgtggggacaggaggaagggggccgtgtgtcacggaggacggtggctttcaccaaacctgctcaggtcccaggaaggaggaccgtgagaggcctccacgtgctgaggtgggagcagttccttggggaagagcaaaagtgggaaaagatttggcactcgttaaagagtagtgatattgaatggggcttctaggagccaggcggaaatgcactggagtggtggggagacaagagaggtccacaaatcccctccgggacctggagacctagaagaaaaaaagtgaaagagggcgcacatcgccctcctcaggggactgcggggtgggacaggagcaaatctagtaccagacaaggattgagggagcttcggtcccgtccccctgctaagtgcggcaggtggagtaaactctggattagaggacggttgacggaggctcccgggccctccccgggatgccgatgggatcgggcgagactctaggcgtgcgggcgaggccgcaggcacccgaccgccccgtctagtggtaa

SEQ ID NO: 475631 - DNA, 444 bp, Homo sapiens
  chr2:219845954-219846398
  hyper
  prostate vs. anorectal,ovary,thyroid,myeloid_neoplasm, non_cancer,uterine,multiple_myeloma
cgtgagaggcctccacgtgctgaggtgggagcagttccttggggaagagcaaaagtgggaaaagatttggcactcgttaaagagtagtgatattgaatggggcttctaggagccaggcggaaatgcactggagtggtggggagacaagagaggtccacaaatcccctccgggacctggagacctagaagaaaaaaagtgaaagagggcgcacatcgccctcctcaggggactgcggggtgggacaggagcaaatctagtaccagacaaggattgagggagcttcggtcccgtccccctgctaagtgcggcaggtggagtaaactctggattagaggacggttgacggaggctcccgggccctccccgggatgccgatgggatcgggcgagactctaggcgtgcgggcgaggccgcaggcacccgaccgccccgtctagtggtaa

SEQ ID NO: 475632 - DNA, 197 bp, Homo sapiens; identical to SEQ ID NO: 349682
  chr2:219847616-219847813
  hyper
  prostate vs. anorectal,thyroid

SEQ ID NO: 475633 - DNA, 34 bp, Homo sapiens; identical to SEQ ID NO: 369968
  chr2:231191894-231191928
  hyper
  prostate vs. multiple_myeloma,pancreas_gallbladder

SEQ ID NO: 475634 - DNA, 168 bp, Homo sapiens; identical to SEQ ID NO: 471175
  chr2:232260775-232260943
  hyper
  prostate vs. lung,head_and_neck,cervical

SEQ ID NO: 475635 - DNA, 41 bp, Homo sapiens; identical to SEQ ID NO: 349699
  chr2:232260984-232261025
  hyper
  prostate vs. lung,head_and_neck,cervical

SEQ ID NO: 475636 - DNA, 105 bp, Homo sapiens; identical to SEQ ID NO: 464464
  chr2:232479181-232479286
  hyper
  prostate vs. upper_gi,myeloid_neoplasm,thyroid, pancreas_gallbladder,cervical,breast,anorectal

SEQ ID NO: 475637 - DNA, 227 bp, Homo sapiens; identical to SEQ ID NO: 349701
  chr2:232479454-232479681
  hyper
  prostate vs. upper_gi,myeloid_neoplasm,thyroid, pancreas_gallbladder,cervical,breast,anorectal

SEQ ID NO: 475638 - DNA, 34 bp, Homo sapiens
  chr2:233499312-233499346
  hyper
  prostate vs. breast
aacttggccgctggcaccggtccggcgggggctc

SEQ ID NO: 475639 - DNA, 165 bp, Homo sapiens; identical to SEQ ID NO: 357503
  chr2:235404971-235405136
  hyper
  prostate vs. cervical

SEQ ID NO: 475640 - DNA, 82 bp, Homo sapiens; identical to SEQ ID NO: 331676
  chr2:242269474-242269556
  hyper
  prostate vs. colorectal,lymphoid_neoplasm

SEQ ID NO: 475641 - DNA, 173 bp, Homo sapiens
  chr2:242549677-242549850
  hyper
  prostate vs. cervical,ovary
agcctccgccggccccgccccggaagcgcagccccgcctcaggcgccgcatctccgccctctcttgcgcctgcgggaccgggagggccgcgctcgccccccagcgccagggtcacgccaccgcgccctgtttggggagcggcagaggagtcagggcggaggctgggcggcgct

SEQ ID NO: 475642 - DNA, 51 bp, Homo sapiens
  chr2:242549957-242550008
  hyper
  prostate vs. cervical,ovary
agaccacagcgaccgcgcccctcggcccggaggccccgccctccccactcc

SEQ ID NO: 475643 - DNA, 121 bp, Homo sapiens; identical to SEQ ID NO: 453152
  chr20:2731109-2731230
  hyper
  prostate vs. upper_gi

SEQ ID NO: 475644 - DNA, 226 bp, Homo sapiens; identical to SEQ ID NO: 453153
  chr20:2731391-2731617
  hyper
  prostate vs. upper_gi

SEQ ID NO: 475645 - DNA, 331 bp, Homo sapiens; identical to SEQ ID NO: 453154
  chr20:2731675-2732006
  hyper
  prostate vs. upper_gi

SEQ ID NO: 475646 - DNA, 414 bp, Homo sapiens; identical to SEQ ID NO: 347652
  chr20:4804008-4804422
  hyper
  prostate vs. melanoma,non_cancer,myeloid_neoplasm

SEQ ID NO: 475647 - DNA, 206 bp, Homo sapiens; identical to SEQ ID NO: 453161
  chr20:21080357-21080563
  hyper
  prostate vs. colorectal,non_cancer,thyroid

SEQ ID NO: 475648 - DNA, 585 bp, Homo sapiens; identical to SEQ ID NO: 455929
  chr20:30193272-30193857
  hyper
  prostate vs. lung

SEQ ID NO: 475649 - DNA, 189 bp, Homo sapiens; identical to SEQ ID NO: 345629
  chr20:30193992-30194181
  hyper
  prostate vs. lung

SEQ ID NO: 475650 - DNA, 4 bp, Homo sapiens
  chr20:42955382-42955386
  hyper
  prostate vs. pancreas_gallbladder
cgcg

SEQ ID NO: 475651 - DNA, 3 bp, Homo sapiens
  chr20:42955431-42955434
  hyper
  prostate vs. pancreas_gallbladder
ggc

SEQ ID NO: 475652 - DNA, 2 bp, Homo sapiens
  chr20:44098343-44098345
  hyper
  prostate vs. cervical,uterine,lung,head_and_neck,ovary, anorectal,pancreas_gallbladder,thyroid,non_cancer,renal, bladder_and_urothelial
cg

SEQ ID NO: 475653 - DNA, 20 bp, Homo sapiens
  chr20:55203829-55203849
  hyper
  prostate vs. thyroid
gggaactgggcgtctctggc

SEQ ID NO: 475654 - DNA, 276 bp, Homo sapiens; identical to SEQ ID NO: 467122
  chr20:55203829-55204105
  hyper
  prostate vs. anorectal

SEQ ID NO: 475655 - DNA, 44 bp, Homo sapiens; identical to SEQ ID NO: 462777
  chr20:62461248-62461292
  hyper
  prostate vs. breast,thyroid,myeloid_neoplasm,non_cancer

SEQ ID NO: 475656 - DNA, 264 bp, Homo sapiens; identical to SEQ ID NO: 352532
  chr20:62461639-62461903
  hyper
  prostate vs. breast,thyroid,myeloid_neoplasm,non_cancer

SEQ ID NO: 475657 - DNA, 292 bp, Homo sapiens; identical to SEQ ID NO: 336532
  chr21:18984005-18984297
  hyper
  prostate vs. upper_gi

SEQ ID NO: 475658 - DNA, 34 bp, Homo sapiens; identical to SEQ ID NO: 459662
  chr21:44847478-44847512
  hyper
  prostate vs. breast,renal,cervical

SEQ ID NO: 475659 - DNA, 56 bp, Homo sapiens; identical to SEQ ID NO: 352570
  chr21:44847864-44847920
  hyper
  prostate vs. breast,renal,cervical

SEQ ID NO: 475660 - DNA, 730 bp, Homo sapiens; identical to SEQ ID NO: 352590
  chr22:25959837-25960567
  hyper
  prostate vs. colorectal,uterine

SEQ ID NO: 475661 - DNA, 124 bp, Homo sapiens; identical to SEQ ID NO: 453179
  chr22:28838056-28838180
  hyper
  prostate vs. uterine,thyroid,sarcoma,upper_gi,non_cancer, multiple_myeloma

SEQ ID NO: 475662 - DNA, 61 bp, Homo sapiens; identical to SEQ ID NO: 453180
  chr22:28838449-28838510
  hyper
  prostate vs. uterine,thyroid,sarcoma,upper_gi,non_cancer, multiple_myeloma

SEQ ID NO: 475663 - DNA, 244 bp, Homo sapiens; identical to SEQ ID NO: 453181
  chr22:28838551-28838795
  hyper
  prostate vs. uterine,thyroid,sarcoma,upper_gi,non_cancer, multiple_myeloma

SEQ ID NO: 475664 - DNA, 125 bp, Homo sapiens; identical to SEQ ID NO: 453182
  chr22:28838844-28838969
  hyper
  prostate vs. uterine,thyroid,sarcoma,upper_gi,non_cancer, multiple_myeloma

SEQ ID NO: 475665 - DNA, 14 bp, Homo sapiens
  chr22:42354024-42354038
  hyper
  prostate vs. multiple_myeloma,lymphoid_neoplasm, non_cancer
gcctgggccctccc

SEQ ID NO: 475666 - DNA, 980 bp, Homo sapiens
  chr22:46933492-46934472
  hyper
  prostate vs. breast,renal,head_and_neck,ovary
cggctgctgcctgggcggtgcgcttggcccgcgcccactccgcccgcgctctccccgcccccggcccggccccgccccgcccccggcccagcggcgtattgttcggccccggggggagccggctcggaggtgcgcgccgagaggatcgctatggagacgcgagggcgcggccgggacggggactggggccctactccccggaggcctccccacccagcctcccggtggggcggggccgaggcaacagggccgggaaaggtggggctggggcccccggtggccgctacccgtggggcggtggctccgcacctcgggctcggggccgcggctcagagcctggctccccaccccggcagaacagatccacggagaccgccgccaggagtgccgcgcgggtaggacccgggggcggaggactggggccgagaggccggggagcccccccccacccattaaggactgcggaggctgtcgaggagggttacccattttacagcaagacgcacggaggctaaaatgcttcaccccgactaaaactccctggactttgaagcccaataggcagctaccggatctgcgtcccacttggtttaaagcgcaacttttaaatgaaagaagaaaaccccggttgacataagggatttggagaggacggcggaggcgcgctcatctcccgcgtgcggcccgacccgagcgttcgcggacgcatcgcggaatccccgagcgtccggctcctcccgaagcgggttgcggggaaggcggggggctgcgggtcctggaagctgcctggggcaagcaagcacccgcagggatttagagctgtgccacagcccctgcccagcctcctacggaggacagcggggggcggggggcagagaccttagagctttcagaaaagtgacacacacccccgcctcctgcggggaaccacggggggccgggggcagctttaggtttgcgtgacgggtacacctgcctcc

SEQ ID NO: 475667 - DNA, 767 bp, Homo sapiens; identical to SEQ ID NO: 352637
  chr22:46933993-46934760
  hyper
  prostate vs. ovary,breast,uterine,colorectal, bladder_and_urothelial

SEQ ID NO: 475668 - DNA, 232 bp, Homo sapiens
  chr3:5018754-5018986
  hyper
  prostate vs. breast,melanoma,bladder_and_urothelial
cgtggttttgacgcagccgtgacagcccttcatccttattaaaatcacacaatgaagcaggtcgcccaagattgaaagcgcgtttccagggcggaccccggtccccgcctttggccagcaaaagtacattctggcagggagggatctctgagccccgaagtgaggtcatgccagttagcagttagaaaaggaggcatttctcacacttgctaaagagtttgacgcttgtgaa

SEQ ID NO: 475669 - DNA, 143 bp, Homo sapiens; identical to SEQ ID NO: 345077
  chr3:5019132-5019275
  hyper
  prostate vs. breast,melanoma,bladder_and_urothelial

SEQ ID NO: 475670 - DNA, 370 bp, Homo sapiens; identical to SEQ ID NO: 455964
  chr3:16553609-16553979
  hyper
  prostate vs. lymphoid_neoplasm,myeloid_neoplasm, multiple_myeloma

SEQ ID NO: 475671 - DNA, 78 bp, Homo sapiens; identical to SEQ ID NO: 345081
  chr3:16555426-16555504
  hyper
  prostate vs. sarcoma,lymphoid_neoplasm,anorectal,thyroid, myeloid_neoplasm

SEQ ID NO: 475672 - DNA, 108 bp, Homo sapiens; identical to SEQ ID NO: 454364
  chr3:16925425-16925533
  hyper
  prostate vs. myeloid_neoplasm,thyroid,non_cancer

SEQ ID NO: 475673 - DNA, 74 bp, Homo sapiens; identical to SEQ ID NO: 454365
  chr3:16925583-16925657
  hyper
  prostate vs. myeloid_neoplasm,thyroid,non_cancer

SEQ ID NO: 475674 - DNA, 231 bp, Homo sapiens; identical to SEQ ID NO: 454366
  chr3:16925705-16925936
  hyper
  prostate vs. myeloid_neoplasm,thyroid,non_cancer

SEQ ID NO: 475675 - DNA, 256 bp, Homo sapiens; identical to SEQ ID NO: 454367
  chr3:16925965-16926221
  hyper
  prostate vs. myeloid_neoplasm,thyroid,non_cancer

SEQ ID NO: 475676 - DNA, 93 bp, Homo sapiens; identical to SEQ ID NO: 357563
  chr3:16926261-16926354
  hyper
  prostate vs. myeloid_neoplasm,thyroid,non_cancer

SEQ ID NO: 475677 - DNA, 340 bp, Homo sapiens; identical to SEQ ID NO: 349744
  chr3:16926663-16927003
  hyper
  prostate vs. liver_bileduct,pancreas_gallbladder

SEQ ID NO: 475678 - DNA, 222 bp, Homo sapiens; identical to SEQ ID NO: 459681
  chr3:25469458-25469680
  hyper
  prostate vs. sarcoma,pancreas_gallbladder, bladder_and_urothelial,ovary,uterine,multiple_myeloma,renal, non_cancer

SEQ ID NO: 475679 - DNA, 130 bp, Homo sapiens; identical to SEQ ID NO: 345083
  chr3:25469874-25470004
  hyper
  prostate vs. sarcoma,pancreas_gallbladder, bladder_and_urothelial,ovary,uterine,multiple_myeloma,renal, non_cancer

SEQ ID NO: 475680 - DNA, 11 bp, Homo sapiens
  chr3:37493509-37493520
  hyper
  prostate vs. sarcoma
cgcagggctca

SEQ ID NO: 475681 - DNA, 1 bp, Homo sapiens
  chr3:37494424-37494425
  hyper
  prostate vs. sarcoma
c

SEQ ID NO: 475682 - DNA, 42 bp, Homo sapiens; identical to SEQ ID NO: 467207
  chr3:38070629-38070671
  hyper
  prostate vs. cervical

SEQ ID NO: 475683 - DNA, 159 bp, Homo sapiens; identical to SEQ ID NO: 455966
  chr3:42542869-42543028
  hyper
  prostate vs. myeloid_neoplasm,ovary,thyroid,colorectal, pancreas_gallbladder

SEQ ID NO: 475684 - DNA, 129 bp, Homo sapiens; identical to SEQ ID NO: 281069
  chr3:42543580-42543709
  hyper
  prostate vs. myeloid_neoplasm,ovary,thyroid,colorectal, pancreas_gallbladder

SEQ ID NO: 475685 - DNA, 94 bp, Homo sapiens; identical to SEQ ID NO: 357607
  chr3:50243562-50243656
  hyper
  prostate vs. uterine,myeloid_neoplasm,thyroid,anorectal

SEQ ID NO: 475686 - DNA, 82 bp, Homo sapiens; identical to SEQ ID NO: 454369
  chr3:50377892-50377974
  hyper
  prostate vs. anorectal,myeloid_neoplasm

SEQ ID NO: 475687 - DNA, 167 bp, Homo sapiens; identical to SEQ ID NO: 346566
  chr3:50378002-50378169
  hyper
  prostate vs. anorectal,myeloid_neoplasm

SEQ ID NO: 475688 - DNA, 166 bp, Homo sapiens
  chr3:57198384-57198550
  hyper
  prostate vs. thyroid,myeloid_neoplasm,anorectal,ovary, renal,uterine,multiple_myeloma,pancreas_gallbladder,non_cancer, breast,head_and_neck,cervical
cgcgcccatcgcccagacagtgtcaaaggagcgctcggttccacgaagacggctcaatgcacacggcgaaagtctgggcacctctccagtctcgtctcaggcacctcacccagatgacacccacgcggccctttggcggaaaaatatccgcaactcgaagcaggga

SEQ ID NO: 475689 - DNA, 568 bp, Homo sapiens; identical to SEQ ID NO: 349779
  chr3:57198581-57199149
  hyper
  prostate vs. thyroid,myeloid_neoplasm,anorectal,ovary, renal,uterine,multiple_myeloma,pancreas_gallbladder,non_cancer, breast,head_and_neck,cervical

SEQ ID NO: 475690 - DNA, 153 bp, Homo sapiens; identical to SEQ ID NO: 455973
  chr3:72149806-72149959
  hyper
  prostate vs. bladder_and_urothelial,lymphoid_neoplasm, anorectal

SEQ ID NO: 475691 - DNA, 96 bp, Homo sapiens; identical to SEQ ID NO: 349792
  chr3:72150077-72150173
  hyper
  prostate vs. bladder_and_urothelial,lymphoid_neoplasm, anorectal

SEQ ID NO: 475692 - DNA, 161 bp, Homo sapiens
  chr3:72787779-72787940
  hyper
  prostate vs. breast,cervical,multiple_myeloma,anorectal, lung
cgggtgccttcccccaacgaaagccactgatgtcgcccctctcctcccagcagcttccagaccgcgaccttctgtagctctgctcagaacttcacctggaacagcttcttacaattcttaaacagcccctcagtcgactgtgattaagcatacactccagc

SEQ ID NO: 475693 - DNA, 1 bp, Homo sapiens
  chr3:72788308-72788309
  hyper
  prostate vs. breast,cervical,multiple_myeloma,anorectal, lung
c

SEQ ID NO: 475694 - DNA, 346 bp, Homo sapiens
  chr3:115377294-115377640
  hyper
  prostate vs. multiple_myeloma,uterine
cgttccctcggcggctctgcagtgtgatctcatctctttgtttctccccggctgccgtcagtcaccggctctctgcgcccccacccgcgcgggctcgcggccgtgctgcgggcgtggcctcagccgctgagaccctggggaccgcagggcgtggcgcggcctccgcccgctgcacggagagccccccagaggcagcgacacggcgcttggggtccgcggggctcctcctccaactccgcagacctccggggaggcctcttgctccccgaacacccgggagttcgctttcatttttaacgaatctccacaatctcttgtttgggagataattgcttctttcaggggc

SEQ ID NO: 475695 - DNA, 27 bp, Homo sapiens
  chr3:115377953-115377980
  hyper
  prostate vs. multiple_myeloma,uterine
cagggccaggggagtggaagagcggcc

SEQ ID NO: 475696 - DNA, 438 bp, Homo sapiens; identical to SEQ ID NO: 345099
  chr3:124773932-124774370
  hyper
  prostate vs. non_cancer,anorectal,myeloid_neoplasm, thyroid,cervical,upper_gi,liver_bileduct,pancreas_gallbladder, renal,uterine,sarcoma,multiple_myeloma,bladder_and_urothelial

SEQ ID NO: 475697 - DNA, 28 bp, Homo sapiens
  chr3:129345777-129345805
  hyper
  prostate vs. breast,multiple_myeloma,sarcoma,cervical, pancreas_gallbladder,liver_bileduct,upper_gi
cgcctcgtcctcccgcggccagaggtgc

SEQ ID NO: 475698 - DNA, 563 bp, Homo sapiens
  chr3:129345876-129346439
  hyper
  prostate vs. breast,multiple_myeloma,sarcoma,cervical, pancreas_gallbladder,liver_bileduct,upper_gi
cgtgctcgtcccgcctcgcttggagggagcaagggctccgagccctgggcccaggtcctgtgcctccgcttccccggctgcgggtacacccccagcttcccgagccccccgggccctcgctgctccacccagaagttgcggtgactgcggccccagcaccccgttccctggccgggcatcacttgcgcagcatgctgcccccagaggacagggctacagttagtcgcccacacctcattcacccccttgggcccttgagcgtcttagaagccgcagatgccaaggaggggacgctgcctcgcggatggtcacttgggagcaaagctggggactaaaggaaccagggacagagattcctgctctcgccaaattggccgctctgggccaggcactgaggacacaccgcgaagccggatagccaggtcctgtcctcagggccctgtccggaagaggactgggcagcctcgagtccgcggcaatgaatgaatgttcaattgcacagatggggaggcgaaggagggagggagggagggagggcagtcgcttgggcggtcattggaggc

SEQ ID NO: 475699 - DNA, 93 bp, Homo sapiens; identical to SEQ ID NO: 349820
  chr3:129346564-129346657
  hyper
  prostate vs. breast,multiple_myeloma,sarcoma,cervical, pancreas_gallbladder,liver_bileduct,upper_gi

SEQ ID NO: 475700 - DNA, 659 bp, Homo sapiens
  chr3:131753156-131753815
  hyper
  prostate vs. lung,multiple_myeloma,myeloid_neoplasm, thyroid,renal,breast,non_cancer,melanoma,sarcoma, bladder_and_urothelial
caactccattcgccccaccccacctgggcgagttgggtggatgtcagaaggcgagaggtaggggatggaagtcccttcagattaaagacgttgcttgctgctgctttttaaaacaacaacagcaatgacaaacgtgcaaaggtgagcgagaaccagtgcatctcaaaagttggtcttgctacgcagcagctccaacagactttgcaatcacagcgccccaggaacacaggaatgaagagttggcatttacttacctgggtgtgccaatctcgaagagtggagagagaattcagcccgggacgaggtctgtcccgcccccaggatgcaaaatccggctttgaagtggaggtggttggtgtggtagttttgtactgatgtaaggggcgtcgcacctccttcccctctcgtcctccgaggtcagtttagcaacagcggctgggaaaggtgctgagagcagagttcggtctctccggaaaccctgactccattctcggtgatgggggtgggggaagagggtgaaaatgttggagatgtcaggtcggctctcagttaactcggagagtaaagaggagggtactgagaaaagagggagggagtggagtggagcgagggaggaaggaaaggagggtggcagaaagagaaggggacgagcgggtggc

SEQ ID NO: 475701 - DNA, 604 bp, Homo sapiens; identical to SEQ ID NO: 458007
  chr3:131753369-131753973
  hyper
  prostate vs. lung,renal,breast,sarcoma,non_cancer, thyroid,myeloid_neoplasm,uterine,bladder_and_urothelial, multiple_myeloma

SEQ ID NO: 475702 - DNA, 80 bp, Homo sapiens; identical to SEQ ID NO: 455991
  chr3:159480852-159480932
  hyper
  prostate vs. lung,renal

SEQ ID NO: 475703 - DNA, 660 bp, Homo sapiens; identical to SEQ ID NO: 345115
  chr3:159480975-159481635
  hyper
  prostate vs. lung,renal

SEQ ID NO: 475704 - DNA, 271 bp, Homo sapiens; identical to SEQ ID NO: 349862
  chr3:169379645-169379916
  hyper
  prostate vs. colorectal,uterine,upper_gi,renal

SEQ ID NO: 475705 - DNA, 571 bp, Homo sapiens; identical to SEQ ID NO: 462831
  chr3:183542795-183543366
  hyper
  prostate vs. cervical,breast

SEQ ID NO: 475706 - DNA, 19 bp, Homo sapiens
  chr3:183543503-183543522
  hyper
  prostate vs. cervical,breast
gccggggccggctgcgcac

SEQ ID NO: 475707 - DNA, 46 bp, Homo sapiens; identical to SEQ ID NO: 454388
  chr3:187455297-187455343
  hyper
  prostate vs. renal,non_cancer,multiple_myeloma,thyroid, lymphoid_neoplasm,colorectal

SEQ ID NO: 475708 - DNA, 447 bp, Homo sapiens; identical to SEQ ID NO: 454389
  chr3:187456666-187457113
  hyper
  prostate vs. non_cancer,thyroid,renal,myeloid_neoplasm, multiple_myeloma

SEQ ID NO: 475709 - DNA, 112 bp, Homo sapiens; identical to SEQ ID NO: 455996
  chr3:193775965-193776077
  hyper
  prostate vs. multiple_myeloma,cervical, bladder_and_urothelial,head_and_neck,thyroid,anorectal, non_cancer,pancreas_gallbladder,upper_gi

SEQ ID NO: 475710 - DNA, 95 bp, Homo sapiens
  chr3:196755864-196755959
  hyper
  prostate vs. cervical,melanoma,thyroid,anorectal, head_and_neck,multiple_myeloma
cggggcgggggtggcggtggcttcatcgtttgcattgatgagtgcgtcgcctgcggccacagcggtgccacgaactccatcccctcggcggtcgc

SEQ ID NO: 475711 - DNA, 341 bp, Homo sapiens; identical to SEQ ID NO: 349896
  chr3:196756044-196756385
  hyper
  prostate vs. cervical,melanoma,thyroid,anorectal, head_and_neck,multiple_myeloma

SEQ ID NO: 475712 - DNA, 57 bp, Homo sapiens; identical to SEQ ID NO: 454399
  chr4:15780742-15780799
  hyper
  prostate vs. multiple_myeloma,non_cancer,thyroid, myeloid_neoplasm,uterine

SEQ ID NO: 475713 - DNA, 353 bp, Homo sapiens; identical to SEQ ID NO: 349919
  chr4:15780742-15781095
  hyper
  prostate vs. multiple_myeloma,sarcoma,non_cancer, myeloid_neoplasm,uterine,thyroid

SEQ ID NO: 475714 - DNA, 225 bp, Homo sapiens
  chr4:16084483-16084708
  hyper
  prostate vs. upper_gi
ctacagccgtgaagctcctggtctgtccacgctcctctttgttgtccggtcggcgtgttctggcagggtgcgccttgagcaccccagttctccatctagcgatagccgcgggtccccgcgcatgcaagcagaagggccgtggagcgagaggctgggaaggtgcttcaagccaggggtgcatgctttctcccacggacgcggggagatggcctcgctttgtacccc

SEQ ID NO: 475715 - DNA, 184 bp, Homo sapiens; identical to SEQ ID NO: 332074
  chr4:37978665-37978849
  hyper
  prostate vs. upper_gi,bladder_and_urothelial,colorectal, head_and_neck,melanoma

SEQ ID NO: 475716 - DNA, 183 bp, Homo sapiens; identical to SEQ ID NO: 464542
  chr4:39047105-39047288
  hyper
  prostate vs. liver_bileduct

SEQ ID NO: 475717 - DNA, 173 bp, Homo sapiens
  chr4:54965627-54965800
  hyper
  prostate vs. ovary
cgttggtctgagtggccccaggagggccccaagtacaaagacacttcagaccttgtcgaacatcagcatgaaaagcttgacggtttcttagctgggaggcctcacagttctgcgccggacagtcctgaactaaccacctgaatgacctctgccaagtccaaaagctgtggaca

SEQ ID NO: 475718 - DNA, 3 bp, Homo sapiens
  chr4:83718790-83718793
  hyper
  prostate vs. ovary
cgc

SEQ ID NO: 475719 - DNA, 91 bp, Homo sapiens
  chr4:83718834-83718925
  hyper
  prostate vs. ovary
agaactgcaaatgggcatagaagattgcggagggggcagggacaggggccttggagaggcaagaggggaaccggtatcttccatctggtgc

SEQ ID NO: 475720 - DNA, 369 bp, Homo sapiens
  chr4:83718966-83719335
  hyper
  prostate vs. ovary
cggtccaactcccttacttgtcctcatctctgtccccaaggtccgtgacccgcggaggtgatgggggggataggagagccccagggaccgcagaggtgacacaatcgcccgcccgtcctccctcgctgggagccgattcagcctgtgccgagcctctcccttcgcgcgcctctgcgcacagcggtggcaccgcaggactccgggtcccccccggctctccatcgggaagccggcaaatgcgcttcctcaggcagaccgcggcggggtgggggcggggggggggcggaagttgaaatactgggacagaaacacctgcccgtcccaagggacggaaaactggatgccaagggggccgcggcgcgcagcggg

SEQ ID NO: 475721 - DNA, 24 bp, Homo sapiens
  chr4:83719425-83719449
  hyper
  prostate vs. ovary
ggccggggcgcagggggcgccggc

SEQ ID NO: 475722 - DNA, 28 bp, Homo sapiens
  chr4:106067046-106067074
  hyper
  prostate vs. cervical
cggggcggggagaaacagaactcggtca

SEQ ID NO: 475723 - DNA, 269 bp, Homo sapiens; identical to SEQ ID NO: 349958
  chr4:106067220-106067489
  hyper
  prostate vs. cervical

SEQ ID NO: 475724 - DNA, 501 bp, Homo sapiens; identical to SEQ ID NO: 332165
  chr4:110481822-110482323
  hyper
  prostate vs. lung,breast,pancreas_gallbladder, head_and_neck,colorectal,bladder_and_urothelial,ovary,upper_gi, uterine,multiple_myeloma

SEQ ID NO: 475725 - DNA, 305 bp, Homo sapiens; identical to SEQ ID NO: 332186
  chr4:120549993-120550298
  hyper
  prostate vs. lung

SEQ ID NO: 475726 - DNA, 71 bp, Homo sapiens; identical to SEQ ID NO: 458079
  chr4:123747655-123747726
  hyper
  prostate vs. sarcoma

SEQ ID NO: 475727 - DNA, 46 bp, Homo sapiens; identical to SEQ ID NO: 459716
  chr4:154143770-154143816
  hyper
  prostate vs. renal,ovary

SEQ ID NO: 475728 - DNA, 214 bp, Homo sapiens; identical to SEQ ID NO: 459717
  chr4:154144184-154144398
  hyper
  prostate vs. renal,ovary

SEQ ID NO: 475729 - DNA, 287 bp, Homo sapiens; identical to SEQ ID NO: 456010
  chr5:1874606-1874893
  hyper
  prostate vs. ovary

SEQ ID NO: 475730 - DNA, 33 bp, Homo sapiens; identical to SEQ ID NO: 456013
  chr5:6583144-6583177
  hyper
  prostate vs. anorectal

SEQ ID NO: 475731 - DNA, 25 bp, Homo sapiens
  chr5:6583754-6583779
  hyper
  prostate vs. anorectal
tgagagccaccgggctgcggtgcgc

SEQ ID NO: 475732 - DNA, 171 bp, Homo sapiens; identical to SEQ ID NO: 456015
  chr5:10564301-10564472
  hyper
  prostate vs. anorectal,myeloid_neoplasm,thyroid, non_cancer,lymphoid_neoplasm,sarcoma

SEQ ID NO: 475733 - DNA, 32 bp, Homo sapiens
  chr5:33892023-33892055
  hyper
  prostate vs. ovary
cgctcgcctgtggcccagcaggaagatgcagg

SEQ ID NO: 475734 - DNA, 22 bp, Homo sapiens
  chr5:40680513-40680535
  hyper
  prostate vs. multiple_myeloma,anorectal,myeloid_neoplasm, lymphoid_neoplasm,non_cancer
cgggtccaggacatctgagggc

SEQ ID NO: 475735 - DNA, 337 bp, Homo sapiens; identical to SEQ ID NO: 456017
  chr5:40680627-40680964
  hyper
  prostate vs. multiple_myeloma,anorectal,myeloid_neoplasm, lymphoid_neoplasm,non_cancer

SEQ ID NO: 475736 - DNA, 89 bp, Homo sapiens; identical to SEQ ID NO: 456018
  chr5:40680875-40680964
  hyper
  prostate vs. multiple_myeloma,myeloid_neoplasm, non_cancer,lymphoid_neoplasm,thyroid,cervical

SEQ ID NO: 475737 - DNA, 99 bp, Homo sapiens; identical to SEQ ID NO: 453281
  chr5:42950747-42950846
  hyper
  prostate vs. sarcoma

SEQ ID NO: 475738 - DNA, 3 bp, Homo sapiens
  chr5:42993305-42993308
  hyper
  prostate vs. myeloid_neoplasm,thyroid
cgc

SEQ ID NO: 475739 - DNA, 215 bp, Homo sapiens; identical to SEQ ID NO: 332355
  chr5:43603571-43603786
  hyper
  prostate vs. melanoma,bladder_and_urothelial,sarcoma, multiple_myeloma

SEQ ID NO: 475740 - DNA, 76 bp, Homo sapiens; identical to SEQ ID NO: 454408
  chr5:54518558-54518634
  hyper
  prostate vs. myeloid_neoplasm

SEQ ID NO: 475741 - DNA, 129 bp, Homo sapiens
  chr5:58334886-58335015
  hyper
  prostate vs. uterine,cervical,thyroid,colorectal,breast, ovary,non_cancer,myeloid_neoplasm,lung
cgccatgctcggatgcccggtgccggcacatgagggctgctccttcatattgcccagcccggcagtgcaacgggggcggaggctgtgctcgcggggcggccggcctcggggaggcacggtctctccagc

SEQ ID NO: 475742 - DNA, 211 bp, Homo sapiens; identical to SEQ ID NO: 469230
  chr5:58335353-58335564
  hyper
  prostate vs. uterine,cervical,thyroid,colorectal,breast, ovary,non_cancer,myeloid_neoplasm,lung

SEQ ID NO: 475743 - DNA, 211 bp, Homo sapiens; identical to SEQ ID NO: 469230
  chr5:58335353-58335564
  hyper
  prostate vs. pancreas_gallbladder,colorectal, myeloid_neoplasm,uterine,non_cancer,thyroid,breast

SEQ ID NO: 475744 - DNA, 73 bp, Homo sapiens; identical to SEQ ID NO: 345171
  chr5:58335881-58335954
  hyper
  prostate vs. pancreas_gallbladder,colorectal, myeloid_neoplasm,uterine,non_cancer,thyroid,breast

SEQ ID NO: 475745 - DNA, 82 bp, Homo sapiens; identical to SEQ ID NO: 464585
  chr5:72416165-72416247
  hyper
  prostate vs. pancreas_gallbladder

SEQ ID NO: 475746 - DNA, 14 bp, Homo sapiens
  chr5:72416751-72416765
  hyper
  prostate vs. pancreas_gallbladder
ccatagctttggac

SEQ ID NO: 475747 - DNA, 400 bp, Homo sapiens; identical to SEQ ID NO: 458140
  chr5:101631635-101632035
  hyper
  prostate vs. breast

SEQ ID NO: 475748 - DNA, 146 bp, Homo sapiens; identical to SEQ ID NO: 458141
  chr5:101632074-101632220
  hyper
  prostate vs. breast

SEQ ID NO: 475749 - DNA, 313 bp, Homo sapiens; identical to SEQ ID NO: 453317
  chr5:101631722-101632035
  hyper
  prostate vs. breast

SEQ ID NO: 475750 - DNA, 222 bp, Homo sapiens; identical to SEQ ID NO: 453318
  chr5:101632074-101632296
  hyper
  prostate vs. breast

SEQ ID NO: 475751 - DNA, 17 bp, Homo sapiens
  chr5:112629411-112629428
  hyper
  prostate vs. bladder_and_urothelial,sarcoma,anorectal, non_cancer
cgcttgcctcaaagact

SEQ ID NO: 475752 - DNA, 470 bp, Homo sapiens; identical to SEQ ID NO: 458145
  chr5:112629778-112630248
  hyper
  prostate vs. bladder_and_urothelial,sarcoma,anorectal, non_cancer

SEQ ID NO: 475753 - DNA, 348 bp, Homo sapiens; identical to SEQ ID NO: 458146
  chr5:112629900-112630248
  hyper
  prostate vs. bladder_and_urothelial

SEQ ID NO: 475754 - DNA, 113 bp, Homo sapiens; identical to SEQ ID NO: 345190
  chr5:112630698-112630811
  hyper
  prostate vs. bladder_and_urothelial

SEQ ID NO: 475755 - DNA, 241 bp, Homo sapiens; identical to SEQ ID NO: 358234
  chr5:131831522-131831763
  hyper
  prostate vs. lung,upper_gi,breast,pancreas_gallbladder

SEQ ID NO: 475756 - DNA, 805 bp, Homo sapiens; identical to SEQ ID NO: 332483
  chr5:132386973-132387778
  hyper
  prostate vs. upper_gi,lymphoid_neoplasm,head_and_neck, pancreas_gallbladder,bladder_and_urothelial,colorectal,uterine, renal,melanoma,sarcoma,multiple_myeloma,cervical,lung, non_cancer,anorectal

SEQ ID NO: 475757 - DNA, 873 bp, Homo sapiens; identical to SEQ ID NO: 332486
  chr5:133862738-133863611
  hyper
  prostate vs. lung,pancreas_gallbladder,head_and_neck, liver_bileduct,breast,ovary,upper_gi,uterine

SEQ ID NO: 475758 - DNA, 73 bp, Homo sapiens; identical to SEQ ID NO: 345194
  chr5:134880614-134880687
  hyper
  prostate vs. thyroid,myeloid_neoplasm

SEQ ID NO: 475759 - DNA, 469 bp, Homo sapiens; identical to SEQ ID NO: 332510
  chr5:139088846-139089315
  hyper
  prostate vs. liver_bileduct,pancreas_gallbladder, upper_gi,ovary

SEQ ID NO: 475760 - DNA, 625 bp, Homo sapiens; identical to SEQ ID NO: 456042
  chr5:142781875-142782500
  hyper
  prostate vs. multiple_myeloma,anorectal

SEQ ID NO: 475761 - DNA, 78 bp, Homo sapiens; identical to SEQ ID NO: 456043
  chr5:142782625-142782703
  hyper
  prostate vs. multiple_myeloma,anorectal

SEQ ID NO: 475762 - DNA, 1 bp, Homo sapiens
  chr5:150536722-150536723
  hyper
  prostate vs. uterine,multiple_myeloma,ovary,breast, sarcoma,bladder_and_urothelial,colorectal
c

SEQ ID NO: 475763 - DNA, 317 bp, Homo sapiens; identical to SEQ ID NO: 471270
  chr5:150536746-150537063
  hyper
  prostate vs. uterine,multiple_myeloma,ovary,breast, sarcoma,bladder_and_urothelial,colorectal

SEQ ID NO: 475764 - DNA, 98 bp, Homo sapiens; identical to SEQ ID NO: 350197
  chr5:151066500-151066598
  hyper
  prostate vs. sarcoma

SEQ ID NO: 475765 - DNA, 13 bp, Homo sapiens
  chr5:169063996-169064009
  hyper
  prostate vs. multiple_myeloma,myeloid_neoplasm, non_cancer
cggcaatcaggaa

SEQ ID NO: 475766 - DNA, 727 bp, Homo sapiens; identical to SEQ ID NO: 332613
  chr5:179245848-179246575
  hyper
  prostate vs. lung,breast,upper_gi,pancreas_gallbladder, liver_bileduct,colorectal,bladder_and_urothelial,ovary

SEQ ID NO: 475767 - DNA, 127 bp, Homo sapiens; identical to SEQ ID NO: 350235
  chr5:180018679-180018806
  hyper
  prostate vs. bladder_and_urothelial,cervical

SEQ ID NO: 475768 - DNA, 394 bp, Homo sapiens; identical to SEQ ID NO: 469266
  chr6:710660-711054
  hyper
  prostate vs. bladder_and_urothelial,multiple_myeloma, cervical

SEQ ID NO: 475769 - DNA, 141 bp, Homo sapiens; identical to SEQ ID NO: 346769
  chr6:711310-711451
  hyper
  prostate vs. bladder_and_urothelial,multiple_myeloma, cervical

SEQ ID NO: 475770 - DNA, 123 bp, Homo sapiens; identical to SEQ ID NO: 345205
  chr6:2841503-2841626
  hyper
  prostate vs. colorectal,head_and_neck,renal, pancreas_gallbladder,liver_bileduct,breast,lung,upper_gi, anorectal,sarcoma,ovary,uterine,non_cancer,multiple_myeloma, cervical,bladder_and_urothelial,myeloid_neoplasm

SEQ ID NO: 475771 - DNA, 731 bp, Homo sapiens
  chr6:2841628-2842359
  hyper
  prostate vs. colorectal,head_and_neck,renal, pancreas_gallbladder,liver_bileduct,breast,lung,upper_gi, anorectal,sarcoma,ovary,uterine,non_cancer,multiple_myeloma, cervical,bladder_and_urothelial,myeloid_neoplasm
ggttcctcctctctctccctgcagctgcagataggagccgcggcctggccctgggctgcctggaaaccgtcacaaacagctctgggaggaagggaattcagggagaagggacaacattctgatctcaggtttcagtcttgccttccgcctgcatctgtcgtcctccctccctccctccctcgcgggctggcccggcctgtacccaggcgggggcgggggatcagaggtcgtctgtctccgtcggggcgcccggaagggatgggggcgcgaagctggcggggagggcgagcgcagggagctgcgggtctgaggggcctgagcctggggggtggggggtgccgggctggaagctgagcgagggagcctggcctctccccgcgcccgcccccgcgccaccgctccgaggcccggccttacccgacaggccgccgaggcacgctccgggctccgagctgggtgcgaggtcaggaaggaggcaccgagggccgctgctcttatagcaggcggaagcgtcacccgggccagcagccgcgggcggggcggcggcccttcccggtgactgcgtaggagtccgagctcccgaggtcgcctaagtgcaagcagaagtgagcgtggcttccgggcagcgccctcctcaggggcgcggcttctttctcagttcaaagcctttccccgaatctctggcaaggacctgaaaagctttttcttactaaggtgtgaatgactgagac

SEQ ID NO: 475772 - DNA, 18 bp, Homo sapiens
  chr6:2903030-2903048
  hyper
  prostate vs. myeloid_neoplasm,thyroid,non_cancer, pancreas_gallbladder,colorectal,multiple_myeloma
cgtgagccactgcgcccg

SEQ ID NO: 475773 - DNA, 156 bp, Homo sapiens; identical to SEQ ID NO: 200240
  chr6:2903557-2903713
  hyper
  prostate vs. myeloid_neoplasm,thyroid,non_cancer, pancreas_gallbladder,colorectal,multiple_myeloma

SEQ ID NO: 475774 - DNA, 73 bp, Homo sapiens; identical to SEQ ID NO: 456061
  chr6:3231938-3232011
  hyper
  prostate vs. liver_bileduct,renal

SEQ ID NO: 475775 - DNA, 70 bp, Homo sapiens; identical to SEQ ID NO: 350259
  chr6:3232260-3232330
  hyper
  prostate vs. liver_bileduct,renal

SEQ ID NO: 475776 - DNA, 699 bp, Homo sapiens; identical to SEQ ID NO: 332640
  chr6:3750702-3751401
  hyper
  prostate vs. pancreas_gallbladder,ovary,lung,sarcoma, renal,melanoma

SEQ ID NO: 475777 - DNA, 2 bp, Homo sapiens
  chr6:10417835-10417837
  hyper
  prostate vs. breast
cg

SEQ ID NO: 475778 - DNA, 227 bp, Homo sapiens; identical to SEQ ID NO: 345207
  chr6:10417842-10418069
  hyper
  prostate vs. breast

SEQ ID NO: 475779 - DNA, 138 bp, Homo sapiens; identical to SEQ ID NO: 461191
  chr6:10418940-10419078
  hyper
  prostate vs. breast

SEQ ID NO: 475780 - DNA, 432 bp, Homo sapiens; identical to SEQ ID NO: 467562
  chr6:21665191-21665623
  hyper
  prostate vs. ovary

SEQ ID NO: 475781 - DNA, 80 bp, Homo sapiens; identical to SEQ ID NO: 469300
  chr6:21665543-21665623
  hyper
  prostate vs. ovary

SEQ ID NO: 475782 - DNA, 269 bp, Homo sapiens; identical to SEQ ID NO: 469301
  chr6:21666189-21666458
  hyper
  prostate vs. ovary

SEQ ID NO: 475783 - DNA, 10 bp, Homo sapiens
  chr6:26087606-26087616
  hyper
  prostate vs. renal,cervical,head_and_neck,thyroid, multiple_myeloma,colorectal
cgtttccccg

SEQ ID NO: 475784 - DNA, 202 bp, Homo sapiens
  chr6:26087985-26088187
  hyper
  prostate vs. renal,cervical,head_and_neck,thyroid, multiple_myeloma,colorectal
acttttggaaccgcccactcccttcccccaactagaatgcttttaaataaatctcgtagttcctcacttgagctgagctaagcctggggctccttgaacctggaactcgggtttatttccaatgtcagctgtgcagttttttccccagtcatctccaaacaggaagttcttccctgagtgcttgccgagaaggctgagcaaa

SEQ ID NO: 475785 - DNA, 5 bp, Homo sapiens
  chr6:26188711-26188716
  hyper
  prostate vs. thyroid,non_cancer,colorectal,anorectal, renal,uterine
cgttt

SEQ ID NO: 475786 - DNA, 130 bp, Homo sapiens; identical to SEQ ID NO: 454440
  chr6:26271217-26271347
  hyper
  prostate vs. myeloid_neoplasm,thyroid,non_cancer, anorectal,multiple_myeloma

SEQ ID NO: 475787 - DNA, 327 bp, Homo sapiens; identical to SEQ ID NO: 454441
  chr6:26272105-26272432
  hyper
  prostate vs. thyroid,myeloid_neoplasm,non_cancer, anorectal

SEQ ID NO: 475788 - DNA, 210 bp, Homo sapiens; identical to SEQ ID NO: 453361
  chr6:26322359-26322569
  hyper
  prostate vs. sarcoma,uterine

SEQ ID NO: 475789 - DNA, 140 bp, Homo sapiens; identical to SEQ ID NO: 453366
  chr6:27059547-27059687
  hyper
  prostate vs. myeloid_neoplasm

SEQ ID NO: 475790 - DNA, 43 bp, Homo sapiens; identical to SEQ ID NO: 350322
  chr6:27059899-27059942
  hyper
  prostate vs. myeloid_neoplasm

SEQ ID NO: 475791 - DNA, 22 bp, Homo sapiens
  chr6:27064607-27064629
  hyper
  prostate vs. multiple_myeloma,thyroid,non_cancer
cgtgggcttctgaagagaaacc

SEQ ID NO: 475792 - DNA, 2 bp, Homo sapiens
  chr6:27858278-27858280
  hyper
  prostate vs. thyroid
cg

SEQ ID NO: 475793 - DNA, 51 bp, Homo sapiens; identical to SEQ ID NO: 454452
  chr6:27858740-27858791
  hyper
  prostate vs. thyroid

SEQ ID NO: 475794 - DNA, 315 bp, Homo sapiens; identical to SEQ ID NO: 453378
  chr6:28456978-28457293
  hyper
  prostate vs. thyroid

SEQ ID NO: 475795 - DNA, 209 bp, Homo sapiens; identical to SEQ ID NO: 453379
  chr6:28457345-28457554
  hyper
  prostate vs. thyroid

SEQ ID NO: 475796 - DNA, 24 bp, Homo sapiens
  chr6:28457530-28457554
  hyper
  prostate vs. thyroid
cgcagtaagttctgaaaatcgcct

SEQ ID NO: 475797 - DNA, 143 bp, Homo sapiens; identical to SEQ ID NO: 350345
  chr6:28458192-28458335
  hyper
  prostate vs. thyroid

SEQ ID NO: 475798 - DNA, 154 bp, Homo sapiens; identical to SEQ ID NO: 464700
  chr6:41339068-41339222
  hyper
  prostate vs. bladder_and_urothelial

SEQ ID NO: 475799 - DNA, 360 bp, Homo sapiens; identical to SEQ ID NO: 358510
  chr6:41340027-41340387
  hyper
  prostate vs. myeloid_neoplasm

SEQ ID NO: 475800 - DNA, 102 bp, Homo sapiens
  chr6:41472031-41472133
  hyper
  prostate vs. bladder_and_urothelial
cgcataggaaaggagggtgctgccgaggtggctgcctgggggcgggccctacaggggtcatttggggcatcccctgcctctaggcaaatccccacggagccc

SEQ ID NO: 475801 - DNA, 46 bp, Homo sapiens
  chr6:44187030-44187076
  hyper
  prostate vs. colorectal,melanoma,pancreas_gallbladder, liver_bileduct,upper_gi,renal,breast,multiple_myeloma,uterine
cggggctttctgcctgccacacgccgtccctgctcactaccccatc

SEQ ID NO: 475802 - DNA, 468 bp, Homo sapiens; identical to SEQ ID NO: 350368
  chr6:44187131-44187599
  hyper
  prostate vs. colorectal,melanoma,pancreas_gallbladder, liver_bileduct,upper_gi,renal,breast,multiple_myeloma,uterine

SEQ ID NO: 475803 - DNA, 434 bp, Homo sapiens
  chr6:49518143-49518577
  hyper
  prostate vs. ovary
cgcctcagctccggagaaaaacgaaaggtgggtgggaaactaggatagaggtgaaaagtaagaggggactgaatcagcgaatgacaaagggagcagggctccggacaggggtaggaggaagaagaggagtgactggggcttgtgtcaagcttcttctgaatggctagacagccgccaggtgggagaggcggagggtgaagaggcgggttccgcacgcggttagcctggggctgatctagtcttcagctttcaccggctgggagtccggagctgcagcagaggccacacccagggcttggtggtcccgcgctttccggagctcagcaggcgcttgctgcttgaaccggtcaaagaaggaacgaatgaatgacccttttgccaggatggagacccgggggcctcagggagctgcgaatcccatggactcctcccgc

SEQ ID NO: 475804 - DNA, 106 bp, Homo sapiens; identical to SEQ ID NO: 467572
  chr6:49518471-49518577
  hyper
  prostate vs. breast,cervical,ovary,upper_gi,uterine, thyroid,colorectal,pancreas_gallbladder

SEQ ID NO: 475805 - DNA, 278 bp, Homo sapiens; identical to SEQ ID NO: 350379
  chr6:49519000-49519278
  hyper
  prostate vs. breast,cervical,ovary,upper_gi,uterine, thyroid,colorectal,pancreas_gallbladder

SEQ ID NO: 475806 - DNA, 44 bp, Homo sapiens; identical to SEQ ID NO: 456074
  chr6:50805695-50805739
  hyper
  prostate vs. multiple_myeloma

SEQ ID NO: 475807 - DNA, 8 bp, Homo sapiens
  chr6:50805846-50805854
  hyper
  prostate vs. multiple_myeloma
taactgtc

SEQ ID NO: 475808 - DNA, 637 bp, Homo sapiens; identical to SEQ ID NO: 456077
  chr6:52227115-52227752
  hyper
  prostate vs. upper_gi,pancreas_gallbladder,colorectal

SEQ ID NO: 475809 - DNA, 133 bp, Homo sapiens; identical to SEQ ID NO: 456078
  chr6:52227876-52228009
  hyper
  prostate vs. upper_gi,pancreas_gallbladder,colorectal

SEQ ID NO: 475810 - DNA, 249 bp, Homo sapiens; identical to SEQ ID NO: 456079
  chr6:56818408-56818657
  hyper
  prostate vs. thyroid,renal,anorectal

SEQ ID NO: 475811 - DNA, 131 bp, Homo sapiens; identical to SEQ ID NO: 459778
  chr6:74161047-74161178
  hyper
  prostate vs. cervical,sarcoma

SEQ ID NO: 475812 - DNA, 179 bp, Homo sapiens; identical to SEQ ID NO: 459779
  chr6:74161321-74161500
  hyper
  prostate vs. cervical,sarcoma

SEQ ID NO: 475813 - DNA, 315 bp, Homo sapiens; identical to SEQ ID NO: 456088
  chr6:107810308-107810623
  hyper
  prostate vs. colorectal,ovary,anorectal,thyroid,uterine, non_cancer,myeloid_neoplasm,head_and_neck, bladder_and_urothelial

SEQ ID NO: 475814 - DNA, 128 bp, Homo sapiens; identical to SEQ ID NO: 346850
  chr6:107810665-107810793
  hyper
  prostate vs. colorectal,ovary,anorectal,thyroid,uterine, non_cancer,myeloid_neoplasm,head_and_neck, bladder_and_urothelial

SEQ ID NO: 475815 - DNA, 315 bp, Homo sapiens; identical to SEQ ID NO: 456088
  chr6:107810308-107810623
  hyper
  prostate vs. ovary,sarcoma,uterine,colorectal,anorectal

SEQ ID NO: 475816 - DNA, 430 bp, Homo sapiens; identical to SEQ ID NO: 350445
  chr6:107810665-107811095
  hyper
  prostate vs. ovary,sarcoma,uterine,colorectal,anorectal

SEQ ID NO: 475817 - DNA, 265 bp, Homo sapiens; identical to SEQ ID NO: 456094
  chr6:111409052-111409317
  hyper
  prostate vs. uterine,anorectal

SEQ ID NO: 475818 - DNA, 274 bp, Homo sapiens; identical to SEQ ID NO: 456095
  chr6:111409368-111409642
  hyper
  prostate vs. uterine,anorectal

SEQ ID NO: 475819 - DNA, 72 bp, Homo sapiens; identical to SEQ ID NO: 332906
  chr6:116691827-116691899
  hyper
  prostate vs. head_and_neck

SEQ ID NO: 475820 - DNA, 365 bp, Homo sapiens; identical to SEQ ID NO: 332922
  chr6:131383375-131383740
  hyper
  prostate vs. ovary,cervical,colorectal

SEQ ID NO: 475821 - DNA, 22 bp, Homo sapiens
  chr6:137241797-137241819
  hyper
  prostate vs. myeloid_neoplasm
cggtaaatcacgacttcagcac

SEQ ID NO: 475822 - DNA, 217 bp, Homo sapiens; identical to SEQ ID NO: 456099
  chr6:137310942-137311159
  hyper
  prostate vs. ovary,sarcoma

SEQ ID NO: 475823 - DNA, 249 bp, Homo sapiens; identical to SEQ ID NO: 332941
  chr6:138724531-138724780
  hyper
  prostate vs. liver_bileduct,breast, bladder_and_urothelial,pancreas_gallbladder

SEQ ID NO: 475824 - DNA, 369 bp, Homo sapiens; identical to SEQ ID NO: 453400
  chr6:143247975-143248344
  hyper
  prostate vs. liver_bileduct,pancreas_gallbladder, colorectal,uterine,non_cancer,renal,upper_gi,cervical

SEQ ID NO: 475825 - DNA, 369 bp, Homo sapiens; identical to SEQ ID NO: 453400
  chr6:143247975-143248344
  hyper
  prostate vs. liver_bileduct,pancreas_gallbladder,uterine, cervical

SEQ ID NO: 475826 - DNA, 208 bp, Homo sapiens; identical to SEQ ID NO: 350470
  chr6:143248451-143248659
  hyper
  prostate vs. liver_bileduct,pancreas_gallbladder,uterine, cervical

SEQ ID NO: 475827 - DNA, 370 bp, Homo sapiens; identical to SEQ ID NO: 332946
  chr6:143268770-143269140
  hyper
  prostate vs. liver_bileduct

SEQ ID NO: 475828 - DNA, 528 bp, Homo sapiens; identical to SEQ ID NO: 346860
  chr6:146136035-146136563
  hyper
  prostate vs. lung,upper_gi,bladder_and_urothelial,renal, pancreas_gallbladder,head_and_neck,ovary,colorectal, myeloid_neoplasm,lymphoid_neoplasm,thyroid,breast, multiple_myeloma,melanoma,cervical,liver_bileduct,uterine

SEQ ID NO: 475829 - DNA, 231 bp, Homo sapiens
  chr6:146136565-146136796
  hyper
  prostate vs. lung,upper_gi,bladder_and_urothelial,renal, pancreas_gallbladder,head_and_neck,ovary,colorectal, myeloid_neoplasm,lymphoid_neoplasm,thyroid,breast, multiple_myeloma,melanoma,cervical,liver_bileduct,uterine
aggtaattagctggggaggggacttgaagccgcttttgcagtgtaccttacatatgactggggagtaaagaaatcccacagggctgtatcaaagaatggatggatgtccacgcccccgctaccaccaccaagccttggtctacggccgagggacagtgattccgagctctgggtgttgggagccgctcacccgcccccacccctctgtcggggactcctgcccaccccgtc

SEQ ID NO: 475830 - DNA, 4 bp, Homo sapiens
  chr7:2558412-2558416
  hyper
  prostate vs. bladder_and_urothelial
cgct

SEQ ID NO: 475831 - DNA, 224 bp, Homo sapiens; identical to SEQ ID NO: 371414
  chr7:2558675-2558899
  hyper
  prostate vs. bladder_and_urothelial

SEQ ID NO: 475832 - DNA, 216 bp, Homo sapiens
  chr7:17339346-17339562
  hyper
  prostate vs. liver_bileduct,upper_gi,anorectal
cggtcttaattctcattcttcgtagagtttggtaaggcgagatgttttaaagagctaaacacatgctgacttttacgaaggggctgagtgcctctaaaggtactttttggtccccaccaactggctttgtgttgcgctcatatttacttatttggcagcaattttgtagcgctcatcgtgaccatatcggtaaagtggatagaagtggtagcaggt

SEQ ID NO: 475833 - DNA, 260 bp, Homo sapiens; identical to SEQ ID NO: 350518
  chr7:17339591-17339851
  hyper
  prostate vs. liver_bileduct,upper_gi,anorectal

SEQ ID NO: 475834 - DNA, 761 bp, Homo sapiens; identical to SEQ ID NO: 454479
  chr7:23510081-23510842
  hyper
  prostate vs. colorectal

SEQ ID NO: 475835 - DNA, 229 bp, Homo sapiens; identical to SEQ ID NO: 454480
  chr7:23513246-23513475
  hyper
  prostate vs. anorectal,uterine

SEQ ID NO: 475836 - DNA, 53 bp, Homo sapiens; identical to SEQ ID NO: 345264
  chr7:23514425-23514478
  hyper
  prostate vs. anorectal,uterine

SEQ ID NO: 475837 - DNA, 242 bp, Homo sapiens; identical to SEQ ID NO: 456120
  chr7:23514425-23514667
  hyper
  prostate vs. uterine

SEQ ID NO: 475838 - DNA, 225 bp, Homo sapiens; identical to SEQ ID NO: 456125
  chr7:26192423-26192648
  hyper
  prostate vs. upper_gi,colorectal,pancreas_gallbladder

SEQ ID NO: 475839 - DNA, 20 bp, Homo sapiens
  chr7:26192666-26192686
  hyper
  prostate vs. upper_gi,colorectal,pancreas_gallbladder
cgctggcggatgtgcgagcg

SEQ ID NO: 475840 - DNA, 112 bp, Homo sapiens; identical to SEQ ID NO: 456127
  chr7:26192748-26192860
  hyper
  prostate vs. upper_gi,colorectal,pancreas_gallbladder

SEQ ID NO: 475841 - DNA, 21 bp, Homo sapiens
  chr7:27196839-27196860
  hyper
  prostate vs. thyroid
tgtggttcgaataaagtcaac

SEQ ID NO: 475842 - DNA, 162 bp, Homo sapiens
  chr7:29185654-29185816
  hyper
  prostate vs. anorectal,uterine,head_and_neck, bladder_and_urothelial,thyroid,breast,myeloid_neoplasm,ovary, non_cancer,sarcoma
cgcgttgagggagtaagggaaagtgtcctgcacccgccaccctcccgcgctaagagcggcagaggaccccacagcttcgtacttccccggaggagctcctggagtaggagacggcttctagcctggaagaaccccgggtgcgacagttgtgccaggaaactt

SEQ ID NO: 475843 - DNA, 37 bp, Homo sapiens; identical to SEQ ID NO: 200915
  chr7:29186197-29186234
  hyper
  prostate vs. anorectal,uterine,head_and_neck, bladder_and_urothelial,thyroid,breast,myeloid_neoplasm,ovary, non_cancer,sarcoma

SEQ ID NO: 475844 - DNA, 339 bp, Homo sapiens
  chr7:32981774-32982113
  hyper
  prostate vs. renal
cgggagcgcaaggcctcccaagtcagggcccgaattccgcgtggtgccaaacggcagctggctccctgaatgcccaccctgaaccctggtaaaaaataaaaaaaacaacaacaaaattccctccaacccggagaaaacaagtccgcctctgttctacctagcagcgccgtggccagtccccgccgcccattctctcttcttccgggcctcgccacaccaacactgcaggacccgtgtcctcgtcccttctccgtagcagaggatgaaaagaacggggtttctccatgtcgcagtggcccagggaactcagaggtggagcgcgggggcagcgtgctcggt

SEQ ID NO: 475845 - DNA, 344 bp, Homo sapiens; identical to SEQ ID NO: 358823
  chr7:32982270-32982614
  hyper
  prostate vs. renal

SEQ ID NO: 475846 - DNA, 687 bp, Homo sapiens; identical to SEQ ID NO: 371530
  chr7:32982270-32982957
  hyper
  prostate vs. renal,lung

SEQ ID NO: 475847 - DNA, 102 bp, Homo sapiens; identical to SEQ ID NO: 345274
  chr7:50344738-50344840
  hyper
  prostate vs. anorectal,non_cancer,myeloid_neoplasm, multiple_myeloma

SEQ ID NO: 475848 - DNA, 78 bp, Homo sapiens
  chr7:98971600-98971678
  hyper
  prostate vs. uterine,pancreas_gallbladder, myeloid_neoplasm,colorectal,lymphoid_neoplasm,ovary,cervical, non_cancer,upper_gi,breast
ggcagagggtcaggatgggaagactccggggaccacctagcccaagacccgcaatcaggcggctctgcaaggctaacc

SEQ ID NO: 475849 - DNA, 396 bp, Homo sapiens; identical to SEQ ID NO: 346916
  chr7:98971810-98972206
  hyper
  prostate vs. uterine,pancreas_gallbladder, myeloid_neoplasm,colorectal,lymphoid_neoplasm,ovary,cervical, non_cancer,upper_gi,breast

SEQ ID NO: 475850 - DNA, 80 bp, Homo sapiens; identical to SEQ ID NO: 456135
  chr7:99155672-99155752
  hyper
  prostate vs. lymphoid_neoplasm,melanoma,sarcoma, liver_bileduct,anorectal,non_cancer,thyroid,multiple_myeloma, renal,head_and_neck

SEQ ID NO: 475851 - DNA, 15 bp, Homo sapiens
  chr7:99156600-99156615
  hyper
  prostate vs. lymphoid_neoplasm,melanoma,sarcoma, liver_bileduct,anorectal,non_cancer,thyroid,multiple_myeloma, renal,head_and_neck
ccgccgtcaggagcc

SEQ ID NO: 475852 - DNA, 216 bp, Homo sapiens; identical to SEQ ID NO: 456137
  chr7:99156600-99156816
  hyper
  prostate vs. melanoma,sarcoma,anorectal,non_cancer, thyroid,lymphoid_neoplasm,renal,head_and_neck,multiple_myeloma, liver_bileduct

SEQ ID NO: 475853 - DNA, 77 bp, Homo sapiens; identical to SEQ ID NO: 345277
  chr7:99156982-99157059
  hyper
  prostate vs. melanoma,sarcoma,anorectal,non_cancer, thyroid,lymphoid_neoplasm,renal,head_and_neck,multiple_myeloma, liver_bileduct

SEQ ID NO: 475854 - DNA, 750 bp, Homo sapiens; identical to SEQ ID NO: 350641
  chr7:120496826-120497576
  hyper
  prostate vs. bladder_and_urothelial,colorectal,ovary, uterine,pancreas_gallbladder,sarcoma,lung,liver_bileduct

SEQ ID NO: 475855 - DNA, 209 bp, Homo sapiens; identical to SEQ ID NO: 474368
  chr7:127671450-127671659
  hyper
  prostate vs. cervical

SEQ ID NO: 475856 - DNA, 82 bp, Homo sapiens; identical to SEQ ID NO: 456144
  chr7:129421203-129421285
  hyper
  prostate vs. cervical,anorectal,thyroid,non_cancer, colorectal,myeloid_neoplasm,head_and_neck,ovary,uterine, bladder_and_urothelial,upper_gi

SEQ ID NO: 475857 - DNA, 282 bp, Homo sapiens; identical to SEQ ID NO: 456145
  chr7:129421349-129421631
  hyper
  prostate vs. cervical,anorectal,thyroid,non_cancer, colorectal,myeloid_neoplasm,head_and_neck,ovary,uterine, bladder_and_urothelial,upper_gi

SEQ ID NO: 475858 - DNA, 17 bp, Homo sapiens
  chr7:129421614-129421631
  hyper
  prostate vs. myeloid_neoplasm,thyroid,non_cancer
cgcctcgagcctccctg

SEQ ID NO: 475859 - DNA, 19 bp, Homo sapiens
  chr7:129423482-129423501
  hyper
  prostate vs. thyroid
tgaaaaacgcaaaaggcac

SEQ ID NO: 475860 - DNA, 170 bp, Homo sapiens; identical to SEQ ID NO: 456147
  chr7:129424378-129424548
  hyper
  prostate vs. non_cancer,thyroid,myeloid_neoplasm

SEQ ID NO: 475861 - DNA, 198 bp, Homo sapiens; identical to SEQ ID NO: 463040
  chr7:139929854-139930052
  hyper
  prostate vs. colorectal,multiple_myeloma,anorectal

SEQ ID NO: 475862 - DNA, 362 bp, Homo sapiens; identical to SEQ ID NO: 345285
  chr7:139930346-139930708
  hyper
  prostate vs. colorectal,multiple_myeloma,anorectal

SEQ ID NO: 475863 - DNA, 25 bp, Homo sapiens
  chr7:141211339-141211364
  hyper
  prostate vs. cervical,upper_gi
cgacctgttctgctcatgatctgtc

SEQ ID NO: 475864 - DNA, 357 bp, Homo sapiens; identical to SEQ ID NO: 201210
  chr7:141211599-141211956
  hyper
  prostate vs. cervical,upper_gi

SEQ ID NO: 475865 - DNA, 999 bp, Homo sapiens; identical to SEQ ID NO: 333283
  chr7:142985430-142986429
  hyper
  prostate vs. upper_gi,lung,bladder_and_urothelial, liver_bileduct,lymphoid_neoplasm,colorectal,breast, head_and_neck

SEQ ID NO: 475866 - DNA, 351 bp, Homo sapiens; identical to SEQ ID NO: 333299
  chr7:150676178-150676529
  hyper
  prostate vs. colorectal,ovary

SEQ ID NO: 475867 - DNA, 194 bp, Homo sapiens
  chr7:155601495-155601689
  hyper
  prostate vs. liver_bileduct
cgcctgagctcccgcctacctccctgatctgcgagccgcgccggcgagtgtcaccgccagcagccggtgggcttcccccagcgcgggggcgggggcgtcccagcttcaagacagccccagcccctaaacgcacctctctccactgtcctttcccccaagcttggtggaacagcccctccccaaccccatacctg

SEQ ID NO: 475868 - DNA, 539 bp, Homo sapiens; identical to SEQ ID NO: 359004
  chr7:155601951-155602490
  hyper
  prostate vs. liver_bileduct

SEQ ID NO: 475869 - DNA, 734 bp, Homo sapiens
  chr7:155602018-155602752
  hyper
  prostate vs. liver_bileduct,colorectal
cgcacctggggcagagcctaggtggttatttaaaatgagggcggccgagcaggctccccaaacctcccgccggcctggggctcccctgccgcctcctgcaccccgcccctgccctcagcacccgagcctccgccttccccatcccttcctcccccacccttaactcctggaatcgggagaaggaaggtaggggagggatcaaccggggatacctcacagactgccagcccctacccccctcggttttaggggacctttgtggggtctgcctgataatcccggcctggctctcctcacccaacccccacttgggccgtccttccccctccttttgtgttgggaacgggaatagccactgcccaaggaaaaaagtatttgttttcgtttcgttcgtctgagggaagttgacagaaggtcagaagttcaaatgctgcctgtgcgcgcggcggcgagagtggccgggcgcggggccgctgggccctgcgtcccccggcagggcggacgggggtcggggggaggcccccgggctgggggctccggctgggacgcggaggcctagaggccaggcaggcggcggactggggatgggggcgcgtcccagggcaggccggcggagcccgcgatgcgccccggcccctgcgcgggcgcccccatctccgcgcccccgccgccggggacactacagcgagcccggcgctgctgttagctcctgcggtgcctgcgctcccgcgcgt

SEQ ID NO: 475870 - DNA, 20 bp, Homo sapiens
  chr8:23020932-23020952
  hyper
  prostate vs. colorectal
cgaacgaacgaacgaacgaa

SEQ ID NO: 475871 - DNA, 25 bp, Homo sapiens
  chr8:23021107-23021132
  hyper
  prostate vs. colorectal
cggcccggtcgctcctgcccagccc

SEQ ID NO: 475872 - DNA, 127 bp, Homo sapiens; identical to SEQ ID NO: 345299
  chr8:23021590-23021717
  hyper
  prostate vs. colorectal

SEQ ID NO: 475873 - DNA, 25 bp, Homo sapiens
  chr8:38323132-38323157
  hyper
  prostate vs. myeloid_neoplasm,multiple_myeloma,thyroid, renal,non_cancer,sarcoma,cervical,anorectal,uterine
cggcaaagacggccggcaatagcag

SEQ ID NO: 475874 - DNA, 103 bp, Homo sapiens; identical to SEQ ID NO: 456164
  chr8:60030067-60030170
  hyper
  prostate vs. myeloid_neoplasm,non_cancer,thyroid

SEQ ID NO: 475875 - DNA, 239 bp, Homo sapiens; identical to SEQ ID NO: 453448
  chr8:60030908-60031147
  hyper
  prostate vs. thyroid,myeloid_neoplasm,non_cancer

SEQ ID NO: 475876 - DNA, 120 bp, Homo sapiens; identical to SEQ ID NO: 463057
  chr8:61822259-61822379
  hyper
  prostate vs. colorectal,ovary,non_cancer,thyroid, myeloid_neoplasm,uterine,bladder_and_urothelial, multiple_myeloma,upper_gi,cervical,pancreas_gallbladder

SEQ ID NO: 475877 - DNA, 144 bp, Homo sapiens; identical to SEQ ID NO: 201426
  chr8:61822883-61823027
  hyper
  prostate vs. colorectal,ovary,non_cancer,thyroid, myeloid_neoplasm,uterine,bladder_and_urothelial, multiple_myeloma,upper_gi,cervical,pancreas_gallbladder

SEQ ID NO: 475878 - DNA, 55 bp, Homo sapiens; identical to SEQ ID NO: 346990
  chr8:72756949-72757004
  hyper
  prostate vs. sarcoma

SEQ ID NO: 475879 - DNA, 95 bp, Homo sapiens
  chr8:73448692-73448787
  hyper
  prostate vs. sarcoma
cggacccggctttaccctcaaacccaggaaagccgggtcacttggggctagggacggcccccgagcgagcggggctgcaggtgccgcgaggaaag

SEQ ID NO: 475880 - DNA, 253 bp, Homo sapiens
  chr8:73448832-73449085
  hyper
  prostate vs. sarcoma
aggaaaataatcctggcaccaccactcaggagccatctgtcttcgccccagttccccggggtcgagcagtcagcccagggtcagggtcctgctgtgggcgggcgggaggacagccctgcagttggaagcagaagggccgagggaatcccgcgaagccgccggagcgcgtcgcggcggggcctcccggggctttcccggccccgggtgcgcggcagccgcgggggctgcgtccctctagtccagtgcagccggg

SEQ ID NO: 475881 - DNA, 264 bp, Homo sapiens
  chr8:73449114-73449378
  hyper
  prostate vs. sarcoma
tggagccaggcccggggcagcaggagtggctggcgcgcggaagctgagggaggcaccccgccgaggtgtgggcggtgcctgcccgcgccccagccgcgccctgggcaccagagcgctgtccccggccgagcgcacagctccggcgccgcgaggcagagccccggcgtccccggcggtgcgctgccggctcgcgcagcccagccatcccgccccgccgcccaccttgacagccgggagcgctgaggaggaagagggggaggggga

SEQ ID NO: 475882 - DNA, 208 bp, Homo sapiens; identical to SEQ ID NO: 459871
  chr8:73449432-73449640
  hyper
  prostate vs. sarcoma

SEQ ID NO: 475883 - DNA, 209 bp, Homo sapiens; identical to SEQ ID NO: 459875
  chr8:80803900-80804109
  hyper
  prostate vs. multiple_myeloma,thyroid

SEQ ID NO: 475884 - DNA, 140 bp, Homo sapiens; identical to SEQ ID NO: 333501
  chr8:91014317-91014457
  hyper
  prostate vs. liver_bileduct

SEQ ID NO: 475885 - DNA, 66 bp, Homo sapiens; identical to SEQ ID NO: 456178
  chr8:91996920-91996986
  hyper
  prostate vs. sarcoma

SEQ ID NO: 475886 - DNA, 53 bp, Homo sapiens
  chr8:94712366-94712419
  hyper
  prostate vs. sarcoma,cervical,ovary,anorectal, head_and_neck,uterine
cggacgcgtctggtacgagactacaagtcgcacaggcggagagggggcccccg

SEQ ID NO: 475887 - DNA, 248 bp, Homo sapiens; identical to SEQ ID NO: 286033
  chr8:94712881-94713129
  hyper
  prostate vs. sarcoma,cervical,ovary,anorectal, head_and_neck,uterine

SEQ ID NO: 475888 - DNA, 249 bp, Homo sapiens
  chr8:94712881-94713130
  hyper
  prostate vs. sarcoma,ovary,cervical,anorectal,thyroid, uterine,bladder_and_urothelial,non_cancer,breast
aggcgcaccctggaaaaccggtaacagcccgagcccagctgcccagggccgcccacactggagggctggggtgagggaagtggaagcctctgtccatggggcctctgcgccgaattccgaccctgagtgggaggctgcacggtccccgctgtgacctggggcctaattccttgggctgcagccaccgccggcggcgaagaggagcccggggcccggccggctgccacccacccacgccaccgggtctcg

SEQ ID NO: 475889 - DNA, 29 bp, Homo sapiens
  chr8:97657762-97657791
  hyper
  prostate vs. renal
cgctcattcgggggcgtgacgggaggacc

SEQ ID NO: 475890 - DNA, 59 bp, Homo sapiens; identical to SEQ ID NO: 350796
  chr8:99953137-99953196
  hyper
  prostate vs. thyroid

SEQ ID NO: 475891 - DNA, 419 bp, Homo sapiens
  chr8:99954762-99955181
  hyper
  prostate vs. anorectal
tctgcctacccctcgggaaaaccaaacggttctgcacccaacgtacacatacttaagggcgggaaaggtgtgaagcccgctgctggggagttgcctcccctttgatgaaaaggaagtgcgaagcgtaggaacgctcttcaggtcaccaccccgtgagtgggaggcttggggagtctgaaggaagagaaagctccctccaaatctcccaaactgagaaaagctgcaggaggaatgaggcagttggagagagaggaccgcaggcatcccgcagctgaggctcaggactgagctctaaaatgaaagcacccctatgggacccaccaggcaaaacgttaaaaaaaaaaaaaatctgaatgcttaggcattctgctgcttccattctgtgtgtcaaatctactttgaagcagttaagtactgca

SEQ ID NO: 475892 - DNA, 90 bp, Homo sapiens
  chr8:107281820-107281910
  hyper
  prostate vs. lung
cgctccaagctgccttgggtccctttctaggctgtcagacttcgccttcctttcctccttgtttttcccagcaaccaaagcatctgaaga

SEQ ID NO: 475893 - DNA, 218 bp, Homo sapiens
  chr8:107282895-107283113
  hyper
  prostate vs. lung
ggcggggaggctgggtttggggcgcgggagcccggccagggacagccgcagaaggaaagtgggggtgtcgccgggggatagagtgggagcagcgtgagagcagtgttgggggcgcagagtggagggcaagcgtgtcttgaacagaacggcaggaggatgggtggaaagtggggcgcgtggaaagcggatttggacgagagcaaaggacgccggtggaa

SEQ ID NO: 475894 - DNA, 218 bp, Homo sapiens; identical to SEQ ID NO: 475893
  chr8:107282895-107283113
  hyper
  prostate vs. lung

SEQ ID NO: 475895 - DNA, 106 bp, Homo sapiens
  chr8:131455079-131455185
  hyper
  prostate vs. anorectal
cgctctcagaaaacgcagcaggtcccaaaatggtacaagcagaaaacacaagccacttcacggtccgcccaggagccaaccccaagctccaagtaggactcccccc

SEQ ID NO: 475896 - DNA, 394 bp, Homo sapiens; identical to SEQ ID NO: 350842
  chr8:144640377-144640771
  hyper
  prostate vs. pancreas_gallbladder,renal,head_and_neck, melanoma,colorectal

SEQ ID NO: 475897 - DNA, 878 bp, Homo sapiens; identical to SEQ ID NO: 333605
  chr9:503936-504814
  hyper
  prostate vs. ovary,breast

SEQ ID NO: 475898 - DNA, 375 bp, Homo sapiens; identical to SEQ ID NO: 333616
  chr9:4297365-4297740
  hyper
  prostate vs. pancreas_gallbladder,liver_bileduct, head_and_neck,upper_gi,ovary,uterine,lung,colorectal,sarcoma, multiple_myeloma,renal

SEQ ID NO: 475899 - DNA, 97 bp, Homo sapiens; identical to SEQ ID NO: 453494
  chr9:19127135-19127232
  hyper
  prostate vs. bladder_and_urothelial

SEQ ID NO: 475900 - DNA, 16 bp, Homo sapiens
  chr9:19127549-19127565
  hyper
  prostate vs. bladder_and_urothelial
gcagcacgtgacccgc

SEQ ID NO: 475901 - DNA, 569 bp, Homo sapiens; identical to SEQ ID NO: 464823
  chr9:27528536-27529105
  hyper
  prostate vs. head_and_neck,multiple_myeloma,renal, pancreas_gallbladder,non_cancer,bladder_and_urothelial, colorectal,upper_gi,melanoma,anorectal,myeloid_neoplasm,thyroid, ovary,breast,cervical,uterine,liver_bileduct,lymphoid_neoplasm,
  CONT. FROM ABOVE: lung

SEQ ID NO: 475902 - DNA, 182 bp, Homo sapiens; identical to SEQ ID NO: 201692
  chr9:27529157-27529339
  hyper
  prostate vs. head_and_neck,multiple_myeloma,renal, pancreas_gallbladder,non_cancer,bladder_and_urothelial, colorectal,upper_gi,melanoma,anorectal,myeloid_neoplasm,thyroid, ovary,breast,cervical,uterine,liver_bileduct,lymphoid_neoplasm,
  CONT. FROM ABOVE: lung

SEQ ID NO: 475903 - DNA, 130 bp, Homo sapiens; identical to SEQ ID NO: 464825
  chr9:27529341-27529471
  hyper
  prostate vs. head_and_neck,multiple_myeloma,renal, pancreas_gallbladder,non_cancer,bladder_and_urothelial, colorectal,upper_gi,melanoma,anorectal,myeloid_neoplasm,thyroid, ovary,breast,cervical,uterine,liver_bileduct,lymphoid_neoplasm,
  CONT. FROM ABOVE: lung

SEQ ID NO: 475904 - DNA, 129 bp, Homo sapiens; identical to SEQ ID NO: 464826
  chr9:27528976-27529105
  hyper
  prostate vs. pancreas_gallbladder,non_cancer,melanoma, colorectal,myeloid_neoplasm,anorectal,bladder_and_urothelial, thyroid,upper_gi,head_and_neck,multiple_myeloma,renal,cervical, uterine,breast,ovary,lymphoid_neoplasm,liver_bileduct,lung

SEQ ID NO: 475905 - DNA, 182 bp, Homo sapiens; identical to SEQ ID NO: 201692
  chr9:27529157-27529339
  hyper
  prostate vs. pancreas_gallbladder,non_cancer,melanoma, colorectal,myeloid_neoplasm,anorectal,bladder_and_urothelial, thyroid,upper_gi,head_and_neck,multiple_myeloma,renal,cervical, uterine,breast,ovary,lymphoid_neoplasm,liver_bileduct,lung

SEQ ID NO: 475906 - DNA, 566 bp, Homo sapiens; identical to SEQ ID NO: 464828
  chr9:27529341-27529907
  hyper
  prostate vs. pancreas_gallbladder,non_cancer,melanoma, colorectal,myeloid_neoplasm,anorectal,bladder_and_urothelial, thyroid,upper_gi,head_and_neck,multiple_myeloma,renal,cervical, uterine,breast,ovary,lymphoid_neoplasm,liver_bileduct,lung

SEQ ID NO: 475907 - DNA, 7 bp, Homo sapiens
  chr9:37025300-37025307
  hyper
  prostate vs. ovary,cervical
cgtggca

SEQ ID NO: 475908 - DNA, 242 bp, Homo sapiens; identical to SEQ ID NO: 464831
  chr9:37035886-37036128
  hyper
  prostate vs. ovary

SEQ ID NO: 475909 - DNA, 238 bp, Homo sapiens; identical to SEQ ID NO: 463087
  chr9:37035890-37036128
  hyper
  prostate vs. myeloid_neoplasm,non_cancer,uterine,thyroid

SEQ ID NO: 475910 - DNA, 207 bp, Homo sapiens
  chr9:66458086-66458293
  hyper
  prostate vs. lymphoid_neoplasm
cgcagttgggaagcacggagacaaaagggggaaagaaggagggagcgggaagccaaaagcctacggtaccgctattaccaggcggaatcccatccaagtactaaccagtcccgaccctgcttagcttcaacagatcagaggcgagccgggcgcgttcagggtggtgtggcctagacgccagcagcggcgcctggctgccccaagagc

SEQ ID NO: 475911 - DNA, 3 bp, Homo sapiens
  chr9:66458592-66458595
  hyper
  prostate vs. lymphoid_neoplasm
tcc

SEQ ID NO: 475912 - DNA, 545 bp, Homo sapiens; identical to SEQ ID NO: 461329
  chr9:93955385-93955930
  hyper
  prostate vs. pancreas_gallbladder,cervical, lymphoid_neoplasm,ovary,myeloid_neoplasm,non_cancer, multiple_myeloma,uterine,colorectal,renal,sarcoma

SEQ ID NO: 475913 - DNA, 82 bp, Homo sapiens; identical to SEQ ID NO: 461330
  chr9:93956177-93956259
  hyper
  prostate vs. pancreas_gallbladder,cervical, lymphoid_neoplasm,ovary,myeloid_neoplasm,non_cancer, multiple_myeloma,uterine,colorectal,renal,sarcoma

SEQ ID NO: 475914 - DNA, 156 bp, Homo sapiens; identical to SEQ ID NO: 453504
  chr9:93955774-93955930
  hyper
  prostate vs. pancreas_gallbladder,cervical, myeloid_neoplasm,colorectal,non_cancer,ovary

SEQ ID NO: 475915 - DNA, 268 bp, Homo sapiens; identical to SEQ ID NO: 453505
  chr9:93956177-93956445
  hyper
  prostate vs. pancreas_gallbladder,cervical, myeloid_neoplasm,colorectal,non_cancer,ovary

SEQ ID NO: 475916 - DNA, 94 bp, Homo sapiens; identical to SEQ ID NO: 454522
  chr9:100503340-100503434
  hyper
  prostate vs. anorectal,sarcoma

SEQ ID NO: 475917 - DNA, 28 bp, Homo sapiens
  chr9:100503960-100503988
  hyper
  prostate vs. anorectal,sarcoma
tgcctcccgggacaaggccagggtcatc

SEQ ID NO: 475918 - DNA, 442 bp, Homo sapiens
  chr9:102586203-102586645
  hyper
  prostate vs. bladder_and_urothelial,head_and_neck,ovary, myeloid_neoplasm,thyroid
cgcagaggagccccggtcacaatggtgcgtttcacggtttcctccacacacttcaccaccgggaggggaacacgggggtgttcctttcgtctgcccacgagaaagaaaggggctttgacagaggtagttatttcttcctaatttacaaccccaaggctctgtgctcccggccccggcggccgcaagcaggagcggcggaacgtgtttccaggcactgaggctttgcctaggtaaccggccgcttgtggggtggagagagcggcggggcgctgggctgggctggaggaaaggctgtgtgggtccctcccgcgaacgctgggcgctcgaggggaactccttcgttggggagaggcggtccccgcccacccgagttctgaggcctcctctcagagaacgactccgcttgaaaggccctcagggaatgcgggacgggaatgcgggc

SEQ ID NO: 475919 - DNA, 183 bp, Homo sapiens
  chr9:102586462-102586645
  hyper
  prostate vs. head_and_neck,bladder_and_urothelial,ovary, myeloid_neoplasm,thyroid
cggcggggcgctgggctgggctggaggaaaggctgtgtgggtccctcccgcgaacgctgggcgctcgaggggaactccttcgttggggagaggcggtccccgcccacccgagttctgaggcctcctctcagagaacgactccgcttgaaaggccctcagggaatgcgggacgggaatgcgggc

SEQ ID NO: 475920 - DNA, 227 bp, Homo sapiens; identical to SEQ ID NO: 347046
  chr9:102586985-102587212
  hyper
  prostate vs. head_and_neck,bladder_and_urothelial,ovary, myeloid_neoplasm,thyroid

SEQ ID NO: 475921 - DNA, 299 bp, Homo sapiens; identical to SEQ ID NO: 333748
  chr9:110187439-110187738
  hyper
  prostate vs. multiple_myeloma,pancreas_gallbladder

SEQ ID NO: 475922 - DNA, 301 bp, Homo sapiens
  chr9:116918462-116918763
  hyper
  prostate vs. bladder_and_urothelial,head_and_neck, liver_bileduct
cgggcgagagttggcgaacgctgcccgccctgccgcgcctggcccggctgcccgatcccgttggggcgggggcagagccagcccgggggtcgggggtgggggtgggtggtggcgcctggagcggccggcggggtgcggaggggggctttttggatgcttgggggaggaggggggtctccgtttggggccgtctcggtgtgttccggtgtctcagtgtctgcaggtcccaagcctgtacgtctccgtttctatctgttcttgtgaaattgtccgcaagtttctaggtcaccaggtctcgggt

SEQ ID NO: 475923 - DNA, 4 bp, Homo sapiens
  chr9:116918888-116918892
  hyper
  prostate vs. bladder_and_urothelial,head_and_neck, liver_bileduct
tcac

SEQ ID NO: 475924 - DNA, 754 bp, Homo sapiens; identical to SEQ ID NO: 459900
  chr9:124132057-124132811
  hyper
  prostate vs. liver_bileduct,head_and_neck

SEQ ID NO: 475925 - DNA, 224 bp, Homo sapiens
  chr9:135117797-135118021
  hyper
  prostate vs. myeloid_neoplasm,multiple_myeloma,cervical, upper_gi,ovary
cggtgagccagagggtcgggagaaacgctgctcgccccacaccccgtcctgcctcccaccacacttacacacacgggactgtggccgacaccccctggcctgtgccaggctcacgggcggcggcggaccccgacctccagttgcctacaattccagtcgctgacttggtcctgttttctattctttatttttcctgcaacccaccagaccccaggcctcaccgg

SEQ ID NO: 475926 - DNA, 131 bp, Homo sapiens; identical to SEQ ID NO: 359453
  chr9:135118060-135118191
  hyper
  prostate vs. myeloid_neoplasm,multiple_myeloma,cervical, upper_gi,ovary

SEQ ID NO: 475927 - DNA, 58 bp, Homo sapiens; identical to SEQ ID NO: 471342
  chr9:136603465-136603523
  hyper
  prostate vs. bladder_and_urothelial,multiple_myeloma

SEQ ID NO: 475928 - DNA, 29 bp, Homo sapiens
  chr9:136603632-136603661
  hyper
  prostate vs. bladder_and_urothelial,multiple_myeloma
gtgaaccccatgccccattacccgtaggc

SEQ ID NO: 475929 - DNA, 637 bp, Homo sapiens
  chr9:140196486-140197123
  hyper
  prostate vs. ovary,breast,cervical,uterine,colorectal
cggcgtccccgggccccgcacgccgcctctgggcgctccgggcgctcggggccgggggtcgccgccgcggggaccccgccgcatccagccgcgcccgggtgggcgacgggggcgcgcgctcggctcgcgggggccgggcccggccggggacggcggcgccgcgcggtcccggtccctactcggttcggctgcggctcccacgcggtcccaaggcgcctccccacgcgccgcagcactagctcgcccgccgcgccggggcgccttttaccttctttatatttgcataacaatggcagcccgtgacgcgcgcgccggcggccccgggattgggccgcgcccacatgggggcggggcgtgggcggtgccgtgcgcaggggtccgggggcgggtcccggcggcggcgcgcttcgcggcagggggcgctggtcgccggcagcgcctgggcgggggaggccaggtggccgccgggggggtccagctccgtcgccgccgccgtccgcgcgccccccgggcgctccgcgtctctttgcggtcgtcccgccccttctccctccggccacccggggaattccaagctccctcagcagccagacccaggccttgcccggtacccgagcgcgaccgccaggtggccccg

SEQ ID NO: 475930 - DNA, 155 bp, Homo sapiens; identical to SEQ ID NO: 347067
  chr9:140197263-140197418
  hyper
  prostate vs. ovary,breast,cervical,uterine,colorectal

SEQ ID NO: 475931 - DNA, 90 bp, Homo sapiens; identical to SEQ ID NO: 454526
  chrY:2655227-2655317
  hyper
  prostate vs. breast,cervical,ovary,uterine,thyroid, anorectal,non_cancer

SEQ ID NO: 475932 - DNA, 596 bp, Homo sapiens; identical to SEQ ID NO: 345675
  chrY:2655346-2655942
  hyper
  prostate vs. breast,cervical,ovary,uterine,thyroid, anorectal,non_cancer

SEQ ID NO: 475933 - DNA, 52 bp, Homo sapiens; identical to SEQ ID NO: 461343
  chrY:4869596-4869648
  hyper
  prostate vs. breast,ovary,uterine,cervical

SEQ ID NO: 475934 - DNA, 49 bp, Homo sapiens; identical to SEQ ID NO: 347757
  chrY:4869714-4869763
  hyper
  prostate vs. breast,ovary,uterine,cervical

SEQ ID NO: 475935 - DNA, 246 bp, Homo sapiens; identical to SEQ ID NO: 345676
  chrY:7140850-7141096
  hyper
  prostate vs. breast,upper_gi,uterine,ovary,cervical, anorectal,non_cancer,bladder_and_urothelial,lung,colorectal, multiple_myeloma,lymphoid_neoplasm,myeloid_neoplasm

SEQ ID NO: 475936 - DNA, 241 bp, Homo sapiens; identical to SEQ ID NO: 461347
  chrY:14533316-14533557
  hyper
  prostate vs. breast

SEQ ID NO: 475937 - DNA, 41 bp, Homo sapiens; identical to SEQ ID NO: 347760
  chrY:14533613-14533654
  hyper
  prostate vs. breast

SEQ ID NO: 475938 - DNA, 461 bp, Homo sapiens; identical to SEQ ID NO: 345677
  chrY:15863654-15864115
  hyper
  prostate vs. breast,ovary,uterine,cervical,anorectal

SEQ ID NO: 475939 - DNA, 74 bp, Homo sapiens; identical to SEQ ID NO: 454528
  chrY:16635744-16635818
  hyper
  prostate vs. breast,cervical,ovary,uterine,thyroid, non_cancer,anorectal

SEQ ID NO: 475940 - DNA, 624 bp, Homo sapiens; identical to SEQ ID NO: 454529
  chrY:16636060-16636684
  hyper
  prostate vs. breast,cervical,ovary,uterine,thyroid, non_cancer,anorectal

SEQ ID NO: 475941 - DNA, 949 bp, Homo sapiens; identical to SEQ ID NO: 454530
  chrY:16636193-16637142
  hyper
  prostate vs. anorectal,breast,ovary,cervical,uterine, sarcoma,non_cancer,thyroid

SEQ ID NO: 475942 - DNA, 76 bp, Homo sapiens; identical to SEQ ID NO: 453538
  chr1:1168275-1168351
  hypo
  prostate vs. renal,melanoma

SEQ ID NO: 475943 - DNA, 114 bp, Homo sapiens; identical to SEQ ID NO: 453539
  chr1:1168984-1169098
  hypo
  prostate vs. renal,melanoma

SEQ ID NO: 475944 - DNA, 462 bp, Homo sapiens; identical to SEQ ID NO: 345682
  chr1:1168984-1169446
  hypo
  prostate vs. melanoma,renal,bladder_and_urothelial, thyroid,breast

SEQ ID NO: 475945 - DNA, 21 bp, Homo sapiens
  chr1:2461988-2462009
  hypo
  prostate vs. myeloid_neoplasm,anorectal,non_cancer, colorectal,uterine,bladder_and_urothelial,ovary,thyroid, pancreas_gallbladder,head_and_neck,sarcoma,multiple_myeloma, cervical,lung
ccttttcccaggccgccaaac

SEQ ID NO: 475946 - DNA, 443 bp, Homo sapiens; identical to SEQ ID NO: 344934
  chr1:2461988-2462431
  hypo
  prostate vs. colorectal,cervical,anorectal,ovary, myeloid_neoplasm,bladder_and_urothelial,non_cancer,uterine, pancreas_gallbladder,head_and_neck,thyroid,multiple_myeloma

SEQ ID NO: 475947 - DNA, 125 bp, Homo sapiens; identical to SEQ ID NO: 336862
  chr1:3697578-3697703
  hypo
  prostate vs. liver_bileduct,bladder_and_urothelial,lung, melanoma,renal,cervical,head_and_neck,lymphoid_neoplasm, upper_gi,thyroid,myeloid_neoplasm,colorectal, pancreas_gallbladder,uterine,non_cancer,anorectal,
  CONT. FROM ABOVE: multiple_myeloma,sarcoma

SEQ ID NO: 475948 - DNA, 174 bp, Homo sapiens; identical to SEQ ID NO: 472623
  chr1:3700211-3700385
  hypo
  prostate vs. liver_bileduct

SEQ ID NO: 475949 - DNA, 609 bp, Homo sapiens; identical to SEQ ID NO: 472624
  chr1:3700414-3701023
  hypo
  prostate vs. liver_bileduct

SEQ ID NO: 475950 - DNA, 36 bp, Homo sapiens; identical to SEQ ID NO: 362299
  chr1:3701052-3701088
  hypo
  prostate vs. liver_bileduct

SEQ ID NO: 475951 - DNA, 307 bp, Homo sapiens; identical to SEQ ID NO: 336864
  chr1:3705404-3705711
  hypo
  prostate vs. renal,melanoma,lymphoid_neoplasm

SEQ ID NO: 475952 - DNA, 26 bp, Homo sapiens
  chr1:6046186-6046212
  hypo
  prostate vs. melanoma,colorectal,renal, pancreas_gallbladder
cgcatttgctaacagcacattttgtt

SEQ ID NO: 475953 - DNA, 121 bp, Homo sapiens; identical to SEQ ID NO: 352764
  chr1:6046277-6046398
  hypo
  prostate vs. melanoma,colorectal,renal, pancreas_gallbladder

SEQ ID NO: 475954 - DNA, 517 bp, Homo sapiens; identical to SEQ ID NO: 455503
  chr1:12226892-12227409
  hypo
  prostate vs. colorectal,myeloid_neoplasm

SEQ ID NO: 475955 - DNA, 207 bp, Homo sapiens; identical to SEQ ID NO: 455504
  chr1:12227438-12227645
  hypo
  prostate vs. colorectal,myeloid_neoplasm

SEQ ID NO: 475956 - DNA, 247 bp, Homo sapiens; identical to SEQ ID NO: 455505
  chr1:12227162-12227409
  hypo
  prostate vs. multiple_myeloma,anorectal,colorectal, non_cancer

SEQ ID NO: 475957 - DNA, 207 bp, Homo sapiens; identical to SEQ ID NO: 455504
  chr1:12227438-12227645
  hypo
  prostate vs. multiple_myeloma,anorectal,colorectal, non_cancer

SEQ ID NO: 475958 - DNA, 148 bp, Homo sapiens; identical to SEQ ID NO: 336949
  chr1:16640899-16641047
  hypo
  prostate vs. breast,upper_gi,head_and_neck

SEQ ID NO: 475959 - DNA, 34 bp, Homo sapiens; identical to SEQ ID NO: 336958
  chr1:19518000-19518034
  hypo
  prostate vs. liver_bileduct,pancreas_gallbladder, lymphoid_neoplasm,breast,colorectal,lung

SEQ ID NO: 475960 - DNA, 112 bp, Homo sapiens; identical to SEQ ID NO: 375721
  chr1:21690437-21690549
  hypo
  prostate vs. anorectal,renal,head_and_neck

SEQ ID NO: 475961 - DNA, 160 bp, Homo sapiens; identical to SEQ ID NO: 336977
  chr1:23411446-23411606
  hypo
  prostate vs. upper_gi,sarcoma,breast,lung, lymphoid_neoplasm,melanoma,head_and_neck,renal, pancreas_gallbladder,cervical,uterine,ovary,colorectal, anorectal

SEQ ID NO: 475962 - DNA, 88 bp, Homo sapiens; identical to SEQ ID NO: 336990
  chr1:27058003-27058091
  hypo
  prostate vs. lung,head_and_neck,bladder_and_urothelial, breast,renal,colorectal,melanoma,multiple_myeloma, pancreas_gallbladder,uterine,sarcoma,ovary,cervical,upper_gi, lymphoid_neoplasm,anorectal

SEQ ID NO: 475963 - DNA, 20 bp, Homo sapiens
  chr1:29061394-29061414
  hypo
  prostate vs. liver_bileduct
tttttaaagtttatcttcac

SEQ ID NO: 475964 - DNA, 138 bp, Homo sapiens; identical to SEQ ID NO: 337016
  chr1:35650183-35650321
  hypo
  prostate vs. pancreas_gallbladder,head_and_neck, multiple_myeloma,lung

SEQ ID NO: 475965 - DNA, 39 bp, Homo sapiens; identical to SEQ ID NO: 475236
  chr1:41326952-41326991
  hypo
  prostate vs. upper_gi

SEQ ID NO: 475966 - DNA, 435 bp, Homo sapiens; identical to SEQ ID NO: 475237
  chr1:41327080-41327515
  hypo
  prostate vs. upper_gi

SEQ ID NO: 475967 - DNA, 254 bp, Homo sapiens; identical to SEQ ID NO: 362446
  chr1:44170219-44170473
  hypo
  prostate vs. lung,liver_bileduct,pancreas_gallbladder, bladder_and_urothelial,ovary

SEQ ID NO: 475968 - DNA, 323 bp, Homo sapiens; identical to SEQ ID NO: 455526
  chr1:52194968-52195291
  hypo
  prostate vs. pancreas_gallbladder,bladder_and_urothelial

SEQ ID NO: 475969 - DNA, 51 bp, Homo sapiens; identical to SEQ ID NO: 375838
  chr1:61716891-61716942
  hypo
  prostate vs. breast

SEQ ID NO: 475970 - DNA, 2 bp, Homo sapiens
  chr1:70710367-70710369
  hypo
  prostate vs. lung
cg

SEQ ID NO: 475971 - DNA, 34 bp, Homo sapiens; identical to SEQ ID NO: 362487
  chr1:70710406-70710440
  hypo
  prostate vs. lung

SEQ ID NO: 475972 - DNA, 62 bp, Homo sapiens
  chr1:78463737-78463799
  hypo
  prostate vs. renal,melanoma,lymphoid_neoplasm,anorectal, uterine,non_cancer,head_and_neck,multiple_myeloma
cgtgagccaccgcaccggcctctgtttgactatctttaaagctcttaaaacgatctcatttc

SEQ ID NO: 475973 - DNA, 155 bp, Homo sapiens; identical to SEQ ID NO: 337108
  chr1:85743342-85743497
  hypo
  prostate vs. renal

SEQ ID NO: 475974 - DNA, 438 bp, Homo sapiens; identical to SEQ ID NO: 464043
  chr1:90308855-90309293
  hypo
  prostate vs. melanoma,multiple_myeloma,sarcoma,anorectal, cervical

SEQ ID NO: 475975 - DNA, 79 bp, Homo sapiens; identical to SEQ ID NO: 453558
  chr1:100928315-100928394
  hypo
  prostate vs. renal,lymphoid_neoplasm,breast

SEQ ID NO: 475976 - DNA, 60 bp, Homo sapiens; identical to SEQ ID NO: 362506
  chr1:100928423-100928483
  hypo
  prostate vs. renal,lymphoid_neoplasm,breast

SEQ ID NO: 475977 - DNA, 818 bp, Homo sapiens; identical to SEQ ID NO: 330937
  chr1:113498720-113499538
  hypo
  prostate vs. upper_gi

SEQ ID NO: 475978 - DNA, 26 bp, Homo sapiens
  chr1:151693837-151693863
  hypo
  prostate vs. myeloid_neoplasm,non_cancer
cgggaaaggcgatcctttagagaccc

SEQ ID NO: 475979 - DNA, 59 bp, Homo sapiens
  chr1:155311726-155311785
  hypo
  prostate vs. melanoma,sarcoma,cervical,anorectal,uterine
cgagaaatcttttttgggagtgagcttcttggggaagtgatcaaaagcatagggtttgg

SEQ ID NO: 475980 - DNA, 467 bp, Homo sapiens; identical to SEQ ID NO: 337188
  chr1:156255276-156255743
  hypo
  prostate vs. uterine,lung,pancreas_gallbladder,renal, sarcoma,colorectal,upper_gi,melanoma

SEQ ID NO: 475981 - DNA, 56 bp, Homo sapiens
  chr1:164637890-164637946
  hypo
  prostate vs. colorectal,bladder_and_urothelial, head_and_neck,uterine,cervical
cgccttaccttccccaggcgcagccaacacttgacatctttttatcagatgagctt

SEQ ID NO: 475982 - DNA, 198 bp, Homo sapiens; identical to SEQ ID NO: 362572
  chr1:164637985-164638183
  hypo
  prostate vs. colorectal,bladder_and_urothelial, head_and_neck,uterine,cervical

SEQ ID NO: 475983 - DNA, 72 bp, Homo sapiens; identical to SEQ ID NO: 337278
  chr1:203690606-203690678
  hypo
  prostate vs. ovary,breast

SEQ ID NO: 475984 - DNA, 95 bp, Homo sapiens; identical to SEQ ID NO: 337300
  chr1:205631157-205631252
  hypo
  prostate vs. liver_bileduct,colorectal

SEQ ID NO: 475985 - DNA, 817 bp, Homo sapiens; identical to SEQ ID NO: 337301
  chr1:205631783-205632600
  hypo
  prostate vs. liver_bileduct,bladder_and_urothelial, breast,melanoma,renal,lung,head_and_neck

SEQ ID NO: 475986 - DNA, 46 bp, Homo sapiens; identical to SEQ ID NO: 376134
  chr1:244857971-244858017
  hypo
  prostate vs. bladder_and_urothelial

SEQ ID NO: 475987 - DNA, 256 bp, Homo sapiens; identical to SEQ ID NO: 340511
  chr10:894796-895052
  hypo
  prostate vs. pancreas_gallbladder,lymphoid_neoplasm, colorectal,upper_gi,breast

SEQ ID NO: 475988 - DNA, 225 bp, Homo sapiens; identical to SEQ ID NO: 340513
  chr10:1053566-1053791
  hypo
  prostate vs. sarcoma,liver_bileduct,lymphoid_neoplasm

SEQ ID NO: 475989 - DNA, 155 bp, Homo sapiens; identical to SEQ ID NO: 340560
  chr10:7871238-7871393
  hypo
  prostate vs. liver_bileduct

SEQ ID NO: 475990 - DNA, 125 bp, Homo sapiens; identical to SEQ ID NO: 475272
  chr10:12390701-12390826
  hypo
  prostate vs. multiple_myeloma,non_cancer,cervical, myeloid_neoplasm,thyroid

SEQ ID NO: 475991 - DNA, 681 bp, Homo sapiens; identical to SEQ ID NO: 475273
  chr10:12390995-12391676
  hypo
  prostate vs. multiple_myeloma,non_cancer,cervical, myeloid_neoplasm,thyroid

SEQ ID NO: 475992 - DNA, 209 bp, Homo sapiens; identical to SEQ ID NO: 452758
  chr10:17270445-17270654
  hypo
  prostate vs. melanoma,sarcoma,uterine,multiple_myeloma, myeloid_neoplasm,non_cancer,ovary

SEQ ID NO: 475993 - DNA, 209 bp, Homo sapiens; identical to SEQ ID NO: 452758
  chr10:17270445-17270654
  hypo
  prostate vs. melanoma,myeloid_neoplasm,uterine,thyroid, non_cancer,renal,multiple_myeloma,sarcoma

SEQ ID NO: 475994 - DNA, 87 bp, Homo sapiens; identical to SEQ ID NO: 340601
  chr10:22883126-22883213
  hypo
  prostate vs. liver_bileduct,pancreas_gallbladder,breast

SEQ ID NO: 475995 - DNA, 54 bp, Homo sapiens; identical to SEQ ID NO: 340613
  chr10:27825982-27826036
  hypo
  prostate vs. bladder_and_urothelial

SEQ ID NO: 475996 - DNA, 97 bp, Homo sapiens
  chr10:35152237-35152334
  hypo
  prostate vs. lymphoid_neoplasm
cgttatcaaataacaaatacttaatttcttttctttttttttttttgagacggagtcttgccaccatacctggcctatttacaggcatcctgtttaa

SEQ ID NO: 475997 - DNA, 12 bp, Homo sapiens
  chr10:52177724-52177736
  hypo
  prostate vs. bladder_and_urothelial,upper_gi,uterine, breast,renal,cervical,colorectal,non_cancer,lymphoid_neoplasm, head_and_neck,ovary,sarcoma,anorectal,thyroid
cgccgtagtaga

SEQ ID NO: 475998 - DNA, 139 bp, Homo sapiens; identical to SEQ ID NO: 340647
  chr10:70218986-70219125
  hypo
  prostate vs. pancreas_gallbladder,lung,liver_bileduct, colorectal,bladder_and_urothelial,breast

SEQ ID NO: 475999 - DNA, 413 bp, Homo sapiens; identical to SEQ ID NO: 468642
  chr10:74079281-74079694
  hypo
  prostate vs. liver_bileduct,lymphoid_neoplasm, pancreas_gallbladder,lung,uterine,upper_gi,multiple_myeloma, breast,bladder_and_urothelial,colorectal,cervical,renal, anorectal,non_cancer,head_and_neck,sarcoma,myeloid_neoplasm,
  CONT. FROM ABOVE: thyroid,ovary

SEQ ID NO: 476000 - DNA, 179 bp, Homo sapiens; identical to SEQ ID NO: 345357
  chr10:74079752-74079931
  hypo
  prostate vs. liver_bileduct,lymphoid_neoplasm, pancreas_gallbladder,lung,uterine,upper_gi,multiple_myeloma, breast,bladder_and_urothelial,colorectal,cervical,renal, anorectal,non_cancer,head_and_neck,sarcoma,myeloid_neoplasm,
  CONT. FROM ABOVE: thyroid,ovary

SEQ ID NO: 476001 - DNA, 39 bp, Homo sapiens; identical to SEQ ID NO: 454624
  chr10:74451119-74451158
  hypo
  prostate vs. sarcoma,lung,head_and_neck,breast,renal, pancreas_gallbladder,non_cancer

SEQ ID NO: 476002 - DNA, 102 bp, Homo sapiens; identical to SEQ ID NO: 340668
  chr10:76287784-76287886
  hypo
  prostate vs. liver_bileduct,head_and_neck

SEQ ID NO: 476003 - DNA, 76 bp, Homo sapiens; identical to SEQ ID NO: 340679
  chr10:79770259-79770335
  hypo
  prostate vs. anorectal,upper_gi,lymphoid_neoplasm,breast

SEQ ID NO: 476004 - DNA, 57 bp, Homo sapiens; identical to SEQ ID NO: 345362
  chr10:93647662-93647719
  hypo
  prostate vs. ovary,anorectal,uterine,non_cancer, myeloid_neoplasm,head_and_neck,cervical

SEQ ID NO: 476005 - DNA, 51 bp, Homo sapiens; identical to SEQ ID NO: 365397
  chr10:98292796-98292847
  hypo
  prostate vs. lymphoid_neoplasm

SEQ ID NO: 476006 - DNA, 723 bp, Homo sapiens; identical to SEQ ID NO: 475294
  chr10:106097237-106097960
  hypo
  prostate vs. head_and_neck

SEQ ID NO: 476007 - DNA, 165 bp, Homo sapiens; identical to SEQ ID NO: 351101
  chr10:106098025-106098190
  hypo
  prostate vs. head_and_neck

SEQ ID NO: 476008 - DNA, 737 bp, Homo sapiens; identical to SEQ ID NO: 334066
  chr10:111767130-111767867
  hypo
  prostate vs. upper_gi,bladder_and_urothelial, pancreas_gallbladder,multiple_myeloma,ovary,colorectal,melanoma, lung,non_cancer,uterine,cervical,anorectal,thyroid,renal, lymphoid_neoplasm,head_and_neck,sarcoma

SEQ ID NO: 476009 - DNA, 164 bp, Homo sapiens; identical to SEQ ID NO: 340740
  chr10:114200406-114200570
  hypo
  prostate vs. pancreas_gallbladder,melanoma,ovary,renal, colorectal,lymphoid_neoplasm,cervical,uterine,sarcoma, myeloid_neoplasm,head_and_neck,upper_gi,non_cancer,anorectal, bladder_and_urothelial,liver_bileduct,lung

SEQ ID NO: 476010 - DNA, 208 bp, Homo sapiens; identical to SEQ ID NO: 340743
  chr10:114591706-114591914
  hypo
  prostate vs. head_and_neck,breast

SEQ ID NO: 476011 - DNA, 137 bp, Homo sapiens; identical to SEQ ID NO: 340758
  chr10:121702253-121702390
  hypo
  prostate vs. liver_bileduct,lung,melanoma,cervical, pancreas_gallbladder,head_and_neck,colorectal,uterine

SEQ ID NO: 476012 - DNA, 48 bp, Homo sapiens; identical to SEQ ID NO: 340765
  chr10:126190228-126190276
  hypo
  prostate vs. liver_bileduct,breast,renal,melanoma,lung, bladder_and_urothelial,anorectal

SEQ ID NO: 476013 - DNA, 143 bp, Homo sapiens; identical to SEQ ID NO: 340783
  chr10:127415629-127415772
  hypo
  prostate vs. anorectal

SEQ ID NO: 476014 - DNA, 203 bp, Homo sapiens; identical to SEQ ID NO: 456366
  chr10:133783038-133783241
  hypo
  prostate vs. sarcoma,renal,lymphoid_neoplasm,colorectal

SEQ ID NO: 476015 - DNA, 23 bp, Homo sapiens
  chr10:133783397-133783420
  hypo
  prostate vs. sarcoma,renal,lymphoid_neoplasm,colorectal
agcagccaggaaaggccaggcgc

SEQ ID NO: 476016 - DNA, 344 bp, Homo sapiens; identical to SEQ ID NO: 472749
  chr11:561903-562247
  hypo
  prostate vs. anorectal,melanoma,lymphoid_neoplasm

SEQ ID NO: 476017 - DNA, 38 bp, Homo sapiens; identical to SEQ ID NO: 472750
  chr11:562209-562247
  hypo
  prostate vs. melanoma,anorectal

SEQ ID NO: 476018 - DNA, 244 bp, Homo sapiens; identical to SEQ ID NO: 348463
  chr11:562884-563128
  hypo
  prostate vs. melanoma,anorectal

SEQ ID NO: 476019 - DNA, 137 bp, Homo sapiens; identical to SEQ ID NO: 340890
  chr11:688396-688533
  hypo
  prostate vs. colorectal

SEQ ID NO: 476020 - DNA, 100 bp, Homo sapiens; identical to SEQ ID NO: 379553
  chr11:980551-980651
  hypo
  prostate vs. liver_bileduct

SEQ ID NO: 476021 - DNA, 129 bp, Homo sapiens; identical to SEQ ID NO: 351149
  chr11:8615887-8616016
  hypo
  prostate vs. ovary

SEQ ID NO: 476022 - DNA, 311 bp, Homo sapiens; identical to SEQ ID NO: 454642
  chr11:9554670-9554981
  hypo
  prostate vs. sarcoma,renal

SEQ ID NO: 476023 - DNA, 203 bp, Homo sapiens; identical to SEQ ID NO: 475302
  chr11:13300232-13300435
  hypo
  prostate vs. ovary,uterine

SEQ ID NO: 476024 - DNA, 200 bp, Homo sapiens; identical to SEQ ID NO: 341010
  chr11:19256446-19256646
  hypo
  prostate vs. lymphoid_neoplasm,liver_bileduct,colorectal, lung,head_and_neck,upper_gi,pancreas_gallbladder,sarcoma,renal, non_cancer,breast,anorectal,uterine,bladder_and_urothelial, thyroid,myeloid_neoplasm,ovary,cervical,melanoma,
  CONT. FROM ABOVE: multiple_myeloma

SEQ ID NO: 476025 - DNA, 929 bp, Homo sapiens; identical to SEQ ID NO: 345384
  chr11:32915113-32916042
  hypo
  prostate vs. lung,lymphoid_neoplasm,liver_bileduct, head_and_neck,breast,pancreas_gallbladder, bladder_and_urothelial,ovary,uterine,renal,upper_gi,melanoma, sarcoma,multiple_myeloma,cervical,colorectal,anorectal,
  CONT. FROM ABOVE: non_cancer,myeloid_neoplasm,thyroid

SEQ ID NO: 476026 - DNA, 203 bp, Homo sapiens
  chr11:48061631-48061834
  hypo
  prostate vs. liver_bileduct
cgcctggccgcttttgccttttcttgacattgccaatgcatcctgtccccgagcgtctctgagttttaagtctcagatttgttttctttggagacaaactgcaggtaggtgttacttctcaccgaagttcccagatagcacaggctttgctaaacaacacagcaccaggaactccatcatagagaccgcaggatgctgtgtgc

SEQ ID NO: 476027 - DNA, 46 bp, Homo sapiens; identical to SEQ ID NO: 354724
  chr11:57235458-57235504
  hypo
  prostate vs. melanoma,renal,cervical,sarcoma, myeloid_neoplasm

SEQ ID NO: 476028 - DNA, 172 bp, Homo sapiens; identical to SEQ ID NO: 341064
  chr11:60648561-60648733
  hypo
  prostate vs. head_and_neck,pancreas_gallbladder, lymphoid_neoplasm,colorectal

SEQ ID NO: 476029 - DNA, 34 bp, Homo sapiens; identical to SEQ ID NO: 359849
  chr11:61596695-61596729
  hypo
  prostate vs. sarcoma,myeloid_neoplasm

SEQ ID NO: 476030 - DNA, 211 bp, Homo sapiens; identical to SEQ ID NO: 464989
  chr11:63849170-63849381
  hypo
  prostate vs. renal,anorectal,head_and_neck

SEQ ID NO: 476031 - DNA, 61 bp, Homo sapiens; identical to SEQ ID NO: 365695
  chr11:63849634-63849695
  hypo
  prostate vs. renal,anorectal,head_and_neck

SEQ ID NO: 476032 - DNA, 550 bp, Homo sapiens; identical to SEQ ID NO: 455613
  chr11:64512349-64512899
  hypo
  prostate vs. ovary

SEQ ID NO: 476033 - DNA, 396 bp, Homo sapiens; identical to SEQ ID NO: 456388
  chr11:64875426-64875822
  hypo
  prostate vs. colorectal,renal,thyroid,ovary,non_cancer, pancreas_gallbladder,melanoma

SEQ ID NO: 476034 - DNA, 189 bp, Homo sapiens; identical to SEQ ID NO: 354749
  chr11:64876158-64876347
  hypo
  prostate vs. colorectal,renal,thyroid,ovary,non_cancer, pancreas_gallbladder,melanoma

SEQ ID NO: 476035 - DNA, 112 bp, Homo sapiens; identical to SEQ ID NO: 351230
  chr11:66886029-66886141
  hypo
  prostate vs. lymphoid_neoplasm,multiple_myeloma

SEQ ID NO: 476036 - DNA, 188 bp, Homo sapiens; identical to SEQ ID NO: 341144
  chr11:67850488-67850676
  hypo
  prostate vs. breast,uterine,pancreas_gallbladder, lymphoid_neoplasm,cervical,renal,colorectal,ovary,upper_gi, anorectal,multiple_myeloma,non_cancer,sarcoma

SEQ ID NO: 476037 - DNA, 31 bp, Homo sapiens; identical to SEQ ID NO: 456406
  chr11:75852075-75852106
  hypo
  prostate vs. liver_bileduct,melanoma,head_and_neck, upper_gi,cervical,colorectal,pancreas_gallbladder,uterine, bladder_and_urothelial

SEQ ID NO: 476038 - DNA, 326 bp, Homo sapiens; identical to SEQ ID NO: 341265
  chr11:121349234-121349560
  hypo
  prostate vs. sarcoma

SEQ ID NO: 476039 - DNA, 235 bp, Homo sapiens; identical to SEQ ID NO: 341306
  chr12:417402-417637
  hypo
  prostate vs. liver_bileduct,uterine

SEQ ID NO: 476040 - DNA, 209 bp, Homo sapiens; identical to SEQ ID NO: 341308
  chr12:939108-939317
  hypo
  prostate vs. liver_bileduct,lung,colorectal, head_and_neck,breast,sarcoma,ovary,uterine,cervical,renal, pancreas_gallbladder,anorectal,lymphoid_neoplasm,upper_gi, melanoma

SEQ ID NO: 476041 - DNA, 2 bp, Homo sapiens
  chr12:2088756-2088758
  hypo
  prostate vs. lymphoid_neoplasm,uterine,liver_bileduct, breast
cg

SEQ ID NO: 476042 - DNA, 86 bp, Homo sapiens; identical to SEQ ID NO: 452813
  chr12:4377809-4377895
  hypo
  prostate vs. lymphoid_neoplasm,non_cancer, myeloid_neoplasm,thyroid

SEQ ID NO: 476043 - DNA, 142 bp, Homo sapiens; identical to SEQ ID NO: 452814
  chr12:4378558-4378700
  hypo
  prostate vs. lymphoid_neoplasm,non_cancer, myeloid_neoplasm,thyroid

SEQ ID NO: 476044 - DNA, 245 bp, Homo sapiens; identical to SEQ ID NO: 452815
  chr12:4378558-4378803
  hypo
  prostate vs. non_cancer,myeloid_neoplasm, lymphoid_neoplasm,thyroid,colorectal

SEQ ID NO: 476045 - DNA, 88 bp, Homo sapiens; identical to SEQ ID NO: 454142
  chr12:4378715-4378803
  hypo
  prostate vs. colorectal

SEQ ID NO: 476046 - DNA, 3 bp, Homo sapiens
  chr12:49363675-49363678
  hypo
  prostate vs. anorectal,thyroid,cervical,head_and_neck, uterine,non_cancer
cgc

SEQ ID NO: 476047 - DNA, 61 bp, Homo sapiens; identical to SEQ ID NO: 473693
  chr12:49364178-49364239
  hypo
  prostate vs. anorectal,thyroid,cervical,head_and_neck, uterine,non_cancer

SEQ ID NO: 476048 - DNA, 165 bp, Homo sapiens; identical to SEQ ID NO: 354898
  chr12:49416380-49416545
  hypo
  prostate vs. pancreas_gallbladder,upper_gi,lung, anorectal,bladder_and_urothelial,ovary,sarcoma,cervical, colorectal,melanoma,head_and_neck,uterine,breast,renal

SEQ ID NO: 476049 - DNA, 3 bp, Homo sapiens
  chr12:52401537-52401540
  hypo
  prostate vs. anorectal,melanoma,thyroid,head_and_neck
tcc

SEQ ID NO: 476050 - DNA, 194 bp, Homo sapiens; identical to SEQ ID NO: 475358
  chr12:53719360-53719554
  hypo
  prostate vs. melanoma,multiple_myeloma,ovary,cervical, uterine

SEQ ID NO: 476051 - DNA, 58 bp, Homo sapiens; identical to SEQ ID NO: 455665
  chr12:54144782-54144840
  hypo
  prostate vs. ovary,non_cancer,uterine

SEQ ID NO: 476052 - DNA, 74 bp, Homo sapiens; identical to SEQ ID NO: 341439
  chr12:56610588-56610662
  hypo
  prostate vs. lung,pancreas_gallbladder

SEQ ID NO: 476053 - DNA, 55 bp, Homo sapiens; identical to SEQ ID NO: 365994
  chr12:72165436-72165491
  hypo
  prostate vs. bladder_and_urothelial

SEQ ID NO: 476054 - DNA, 259 bp, Homo sapiens; identical to SEQ ID NO: 341458
  chr12:77216021-77216280
  hypo
  prostate vs. breast,upper_gi,head_and_neck, bladder_and_urothelial,lymphoid_neoplasm,lung,melanoma, pancreas_gallbladder,sarcoma

SEQ ID NO: 476055 - DNA, 125 bp, Homo sapiens
  chr12:90025696-90025821
  hypo
  prostate vs. head_and_neck,lymphoid_neoplasm,uterine, lung,renal
cgtgctcggcctgaaggttatacaactattaaatgtcaaggcaaagattcagtccagctctgtcagaggataaagagtatattcttcttcagttataatgctgataagtctgcttacggttctcc

SEQ ID NO: 476056 - DNA, 31 bp, Homo sapiens; identical to SEQ ID NO: 452825
  chr12:94543992-94544023
  hypo
  prostate vs. thyroid

SEQ ID NO: 476057 - DNA, 86 bp, Homo sapiens; identical to SEQ ID NO: 345430
  chr12:94544052-94544138
  hypo
  prostate vs. thyroid

SEQ ID NO: 476058 - DNA, 324 bp, Homo sapiens; identical to SEQ ID NO: 341473
  chr12:102301906-102302230
  hypo
  prostate vs. liver_bileduct

SEQ ID NO: 476059 - DNA, 349 bp, Homo sapiens; identical to SEQ ID NO: 459395
  chr12:104851545-104851894
  hypo
  prostate vs. melanoma,multiple_myeloma,non_cancer, myeloid_neoplasm,bladder_and_urothelial

SEQ ID NO: 476060 - DNA, 635 bp, Homo sapiens; identical to SEQ ID NO: 453627
  chr12:110352780-110353415
  hypo
  prostate vs. liver_bileduct

SEQ ID NO: 476061 - DNA, 321 bp, Homo sapiens; identical to SEQ ID NO: 455674
  chr12:111844290-111844611
  hypo
  prostate vs. lymphoid_neoplasm,anorectal,liver_bileduct, non_cancer,myeloid_neoplasm,sarcoma,multiple_myeloma,upper_gi, colorectal

SEQ ID NO: 476062 - DNA, 235 bp, Homo sapiens; identical to SEQ ID NO: 366042
  chr12:112743068-112743303
  hypo
  prostate vs. renal,melanoma

SEQ ID NO: 476063 - DNA, 40 bp, Homo sapiens; identical to SEQ ID NO: 456452
  chr12:122192684-122192724
  hypo
  prostate vs. melanoma,cervical,colorectal,renal, liver_bileduct,anorectal,lymphoid_neoplasm,ovary, myeloid_neoplasm,thyroid

SEQ ID NO: 476064 - DNA, 117 bp, Homo sapiens; identical to SEQ ID NO: 456453
  chr12:122192843-122192960
  hypo
  prostate vs. melanoma,cervical,colorectal,renal, liver_bileduct,anorectal,lymphoid_neoplasm,ovary, myeloid_neoplasm,thyroid

SEQ ID NO: 476065 - DNA, 45 bp, Homo sapiens; identical to SEQ ID NO: 346063
  chr12:122192989-122193034
  hypo
  prostate vs. melanoma,cervical,colorectal,renal, liver_bileduct,anorectal,lymphoid_neoplasm,ovary, myeloid_neoplasm,thyroid

SEQ ID NO: 476066 - DNA, 158 bp, Homo sapiens; identical to SEQ ID NO: 341593
  chr12:124171347-124171505
  hypo
  prostate vs. bladder_and_urothelial,lymphoid_neoplasm, head_and_neck,lung,pancreas_gallbladder,colorectal,sarcoma, renal,cervical,liver_bileduct,breast

SEQ ID NO: 476067 - DNA, 84 bp, Homo sapiens; identical to SEQ ID NO: 341596
  chr12:124832004-124832088
  hypo
  prostate vs. upper_gi,sarcoma,melanoma,colorectal, anorectal,bladder_and_urothelial,head_and_neck,liver_bileduct

SEQ ID NO: 476068 - DNA, 643 bp, Homo sapiens
  chr12:124832318-124832961
  hypo
  prostate vs. liver_bileduct,melanoma
cgtgactgtacacccgttgggggcaacgagggagcagggaacagggcagtaccttgtgtgatggacccgcggatgtggtgctgctctttgaggtggtgggggctgtgtcgctccggcgggatggcacggcccatgagacctgggtaggagagggtgaggccatcattccgtggctccctgagccgacactgggcagtgacaggggtcagtgtttacagccgccagtggtcatccccacgatgatggtggagtaggacccagcacgggaaggtccctgcgctacctccagatggagcctcagaaagcccagcctcggtttccccatctgtaaaacggggtcagccatccccccaccgcccaccagggggcaccgagagatgaagtctcctccctgctatcaccttcgatgctggctgaggagatggctctgcccacgcggccctccatcatgtcataggtgcgcttgggggcggccgtctcatgggggggtcctgagctgcttctgccgtcctccttggagcactgggtcacagacatgccacctggaaaccacacaaagcactcggtgaggagctgggcacgggcccaggaccacggtgggcaggcaggacaggcagagccggtaggcaggagccagcagtgc

SEQ ID NO: 476069 - DNA, 257 bp, Homo sapiens; identical to SEQ ID NO: 354986
  chr12:124832990-124833247
  hypo
  prostate vs. liver_bileduct,melanoma

SEQ ID NO: 476070 - DNA, 26 bp, Homo sapiens
  chr12:132423564-132423590
  hypo
  prostate vs. melanoma,sarcoma
cgtgagccactatgcccggccctcca

SEQ ID NO: 476071 - DNA, 173 bp, Homo sapiens; identical to SEQ ID NO: 355019
  chr12:132423854-132424027
  hypo
  prostate vs. melanoma,sarcoma

SEQ ID NO: 476072 - DNA, 776 bp, Homo sapiens; identical to SEQ ID NO: 474605
  chr12:133353796-133354572
  hypo
  prostate vs. upper_gi,bladder_and_urothelial, head_and_neck

SEQ ID NO: 476073 - DNA, 168 bp, Homo sapiens; identical to SEQ ID NO: 462415
  chr13:20735265-20735433
  hypo
  prostate vs. myeloid_neoplasm,head_and_neck,uterine, non_cancer,cervical,ovary,colorectal,thyroid, bladder_and_urothelial,anorectal

SEQ ID NO: 476074 - DNA, 144 bp, Homo sapiens; identical to SEQ ID NO: 341687
  chr13:21407292-21407436
  hypo
  prostate vs. melanoma

SEQ ID NO: 476075 - DNA, 142 bp, Homo sapiens; identical to SEQ ID NO: 351449
  chr13:22243864-22244006
  hypo
  prostate vs. myeloid_neoplasm

SEQ ID NO: 476076 - DNA, 536 bp, Homo sapiens; identical to SEQ ID NO: 373227
  chr13:22244073-22244609
  hypo
  prostate vs. lung

SEQ ID NO: 476077 - DNA, 201 bp, Homo sapiens; identical to SEQ ID NO: 452842
  chr13:29292491-29292692
  hypo
  prostate vs. uterine,ovary

SEQ ID NO: 476078 - DNA, 242 bp, Homo sapiens; identical to SEQ ID NO: 345442
  chr13:29293342-29293584
  hypo
  prostate vs. multiple_myeloma,uterine

SEQ ID NO: 476079 - DNA, 178 bp, Homo sapiens; identical to SEQ ID NO: 468743
  chr13:33000891-33001069
  hypo
  prostate vs. anorectal,multiple_myeloma,cervical

SEQ ID NO: 476080 - DNA, 204 bp, Homo sapiens; identical to SEQ ID NO: 351462
  chr13:33001228-33001432
  hypo
  prostate vs. anorectal,multiple_myeloma,cervical

SEQ ID NO: 476081 - DNA, 126 bp, Homo sapiens
  chr13:50027697-50027823
  hypo
  prostate vs. lung
cgctgggattacaggcatgaaccaccatgtcctgctcagttggctcttgtgtccctttgatataccgtcatcagtgtaggtattttttatttgtctttgttttatagcacttcccttttggcactc

SEQ ID NO: 476082 - DNA, 97 bp, Homo sapiens; identical to SEQ ID NO: 341738
  chr13:50050867-50050964
  hypo
  prostate vs. bladder_and_urothelial,lung, pancreas_gallbladder,upper_gi,breast,lymphoid_neoplasm,uterine, ovary

SEQ ID NO: 476083 - DNA, 54 bp, Homo sapiens; identical to SEQ ID NO: 341745
  chr13:73324122-73324176
  hypo
  prostate vs. lung,head_and_neck

SEQ ID NO: 476084 - DNA, 915 bp, Homo sapiens; identical to SEQ ID NO: 351487
  chr13:74707668-74708583
  hypo
  prostate vs. ovary,uterine,sarcoma,multiple_myeloma, breast,lymphoid_neoplasm,non_cancer

SEQ ID NO: 476085 - DNA, 73 bp, Homo sapiens; identical to SEQ ID NO: 355060
  chr13:96409644-96409717
  hypo
  prostate vs. pancreas_gallbladder,liver_bileduct

SEQ ID NO: 476086 - DNA, 25 bp, Homo sapiens
  chr13:99851652-99851677
  hypo
  prostate vs. lymphoid_neoplasm,renal,melanoma, multiple_myeloma,sarcoma
aaacaaacgaacaaaacaagactgt

SEQ ID NO: 476087 - DNA, 97 bp, Homo sapiens; identical to SEQ ID NO: 355067
  chr13:99851706-99851803
  hypo
  prostate vs. lymphoid_neoplasm,renal,melanoma, multiple_myeloma,sarcoma

SEQ ID NO: 476088 - DNA, 42 bp, Homo sapiens; identical to SEQ ID NO: 460080
  chr13:111363839-111363881
  hypo

SEQ ID NO: 476089 - DNA, 677 bp, Homo sapiens; identical to SEQ ID NO: 341846
  chr13:114293940-114294617
  hypo
  prostate vs. bladder_and_urothelial

SEQ ID NO: 476090 - DNA, 39 bp, Homo sapiens; identical to SEQ ID NO: 341847
  chr13:114294965-114295004
  hypo
  prostate vs. cervical

SEQ ID NO: 476091 - DNA, 131 bp, Homo sapiens; identical to SEQ ID NO: 341848
  chr13:114295766-114295897
  hypo
  prostate vs. upper_gi,lymphoid_neoplasm, bladder_and_urothelial,renal,lung,colorectal,breast

SEQ ID NO: 476092 - DNA, 303 bp, Homo sapiens; identical to SEQ ID NO: 475392
  chr13:114565969-114566272
  hypo
  prostate vs. sarcoma,thyroid,breast,colorectal, head_and_neck,ovary,lung,upper_gi,uterine,multiple_myeloma, bladder_and_urothelial,myeloid_neoplasm,cervical, pancreas_gallbladder,non_cancer

SEQ ID NO: 476093 - DNA, 114 bp, Homo sapiens; identical to SEQ ID NO: 347278
  chr13:114566409-114566523
  hypo
  prostate vs. sarcoma,thyroid,breast,colorectal, head_and_neck,ovary,lung,upper_gi,uterine,multiple_myeloma, bladder_and_urothelial,myeloid_neoplasm,cervical, pancreas_gallbladder,non_cancer

SEQ ID NO: 476094 - DNA, 127 bp, Homo sapiens
  chr14:21689073-21689200
  hypo
  prostate vs. head_and_neck,bladder_and_urothelial, pancreas_gallbladder,colorectal,uterine,lymphoid_neoplasm, melanoma,multiple_myeloma,lung,cervical,ovary,renal,sarcoma, anorectal,liver_bileduct,non_cancer
cgtctctactaaaatacacaaaaaaagtcaggtatggtggcgcgccggtattcccaggaactcacaagaggctaaggcaggaggatcccttgaaaccgggaggcaaaaggtgcagtgagctgagatc

SEQ ID NO: 476095 - DNA, 68 bp, Homo sapiens; identical to SEQ ID NO: 366351
  chr14:21943040-21943108
  hypo
  prostate vs. renal,sarcoma

SEQ ID NO: 476096 - DNA, 78 bp, Homo sapiens; identical to SEQ ID NO: 351523
  chr14:23835314-23835392
  hypo
  prostate vs. head_and_neck,multiple_myeloma,sarcoma, cervical,anorectal

SEQ ID NO: 476097 - DNA, 196 bp, Homo sapiens; identical to SEQ ID NO: 334941
  chr14:62105869-62106065
  hypo
  prostate vs. lymphoid_neoplasm,renal

SEQ ID NO: 476098 - DNA, 241 bp, Homo sapiens; identical to SEQ ID NO: 341949
  chr14:69666624-69666865
  hypo
  prostate vs. lung,pancreas_gallbladder,breast, liver_bileduct,melanoma,lymphoid_neoplasm,head_and_neck, anorectal

SEQ ID NO: 476099 - DNA, 27 bp, Homo sapiens
  chr14:70236238-70236265
  hypo
  prostate vs. melanoma,sarcoma,myeloid_neoplasm,anorectal
cgttggccttatgacgaggagtgcctg

SEQ ID NO: 476100 - DNA, 419 bp, Homo sapiens; identical to SEQ ID NO: 355138
  chr14:70236294-70236713
  hypo
  prostate vs. melanoma,sarcoma,myeloid_neoplasm,anorectal

SEQ ID NO: 476101 - DNA, 262 bp, Homo sapiens; identical to SEQ ID NO: 341969
  chr14:75567786-75568048
  hypo
  prostate vs. anorectal,head_and_neck, bladder_and_urothelial,upper_gi

SEQ ID NO: 476102 - DNA, 144 bp, Homo sapiens; identical to SEQ ID NO: 380617
  chr14:89786296-89786440
  hypo
  prostate vs. upper_gi

SEQ ID NO: 476103 - DNA, 383 bp, Homo sapiens; identical to SEQ ID NO: 454181
  chr14:90849476-90849859
  hypo
  prostate vs. anorectal,ovary,non_cancer,multiple_myeloma, thyroid,sarcoma,myeloid_neoplasm,upper_gi,pancreas_gallbladder, colorectal,liver_bileduct

SEQ ID NO: 476104 - DNA, 54 bp, Homo sapiens; identical to SEQ ID NO: 454182
  chr14:90849897-90849951
  hypo
  prostate vs. anorectal,ovary,non_cancer,multiple_myeloma, thyroid,sarcoma,myeloid_neoplasm,upper_gi,pancreas_gallbladder, colorectal,liver_bileduct

SEQ ID NO: 476105 - DNA, 137 bp, Homo sapiens; identical to SEQ ID NO: 454183
  chr14:90849722-90849859
  hypo
  prostate vs. anorectal,thyroid,myeloid_neoplasm, non_cancer,pancreas_gallbladder,colorectal

SEQ ID NO: 476106 - DNA, 54 bp, Homo sapiens; identical to SEQ ID NO: 454182
  chr14:90849897-90849951
  hypo
  prostate vs. anorectal,thyroid,myeloid_neoplasm, non_cancer,pancreas_gallbladder,colorectal

SEQ ID NO: 476107 - DNA, 259 bp, Homo sapiens; identical to SEQ ID NO: 341995
  chr14:91757493-91757752
  hypo
  prostate vs. cervical,lung

SEQ ID NO: 476108 - DNA, 57 bp, Homo sapiens
  chr14:102335792-102335849
  hypo
  prostate vs. melanoma
cgctaggtgaatggtaagtgtgtgttgagctttctaaggaactgccaaaccgttttc

SEQ ID NO: 476109 - DNA, 142 bp, Homo sapiens; identical to SEQ ID NO: 335034
  chr14:103430237-103430379
  hypo
  prostate vs. sarcoma,lung,cervical,head_and_neck, melanoma,liver_bileduct,anorectal,upper_gi,ovary, bladder_and_urothelial,pancreas_gallbladder,uterine,renal, lymphoid_neoplasm,breast,colorectal,multiple_myeloma

SEQ ID NO: 476110 - DNA, 265 bp, Homo sapiens; identical to SEQ ID NO: 380714
  chr14:104164986-104165251
  hypo
  prostate vs. liver_bileduct

SEQ ID NO: 476111 - DNA, 281 bp, Homo sapiens; identical to SEQ ID NO: 465133
  chr14:104194172-104194453
  hypo
  prostate vs. head_and_neck,anorectal,liver_bileduct, renal,multiple_myeloma,lymphoid_neoplasm

SEQ ID NO: 476112 - DNA, 205 bp, Homo sapiens; identical to SEQ ID NO: 465134
  chr14:104194491-104194696
  hypo
  prostate vs. head_and_neck,anorectal,liver_bileduct, renal,multiple_myeloma,lymphoid_neoplasm

SEQ ID NO: 476113 - DNA, 90 bp, Homo sapiens; identical to SEQ ID NO: 355204
  chr14:104194750-104194840
  hypo
  prostate vs. head_and_neck,anorectal,liver_bileduct, renal,multiple_myeloma,lymphoid_neoplasm

SEQ ID NO: 476114 - DNA, 336 bp, Homo sapiens; identical to SEQ ID NO: 454784
  chr14:104202370-104202706
  hypo
  prostate vs. liver_bileduct,melanoma

SEQ ID NO: 476115 - DNA, 39 bp, Homo sapiens; identical to SEQ ID NO: 454792
  chr14:105214099-105214138
  hypo
  prostate vs. liver_bileduct,sarcoma

SEQ ID NO: 476116 - DNA, 168 bp, Homo sapiens; identical to SEQ ID NO: 456506
  chr14:105240770-105240938
  hypo
  prostate vs. lymphoid_neoplasm,renal,multiple_myeloma

SEQ ID NO: 476117 - DNA, 133 bp, Homo sapiens; identical to SEQ ID NO: 456507
  chr14:105241177-105241310
  hypo
  prostate vs. lymphoid_neoplasm,renal,multiple_myeloma

SEQ ID NO: 476118 - DNA, 227 bp, Homo sapiens; identical to SEQ ID NO: 348648
  chr14:105241428-105241655
  hypo
  prostate vs. lymphoid_neoplasm,renal,multiple_myeloma

SEQ ID NO: 476119 - DNA, 65 bp, Homo sapiens; identical to SEQ ID NO: 472882
  chr14:105268589-105268654
  hypo
  prostate vs. bladder_and_urothelial,melanoma

SEQ ID NO: 476120 - DNA, 640 bp, Homo sapiens; identical to SEQ ID NO: 342110
  chr14:105687735-105688375
  hypo
  prostate vs. pancreas_gallbladder,head_and_neck, bladder_and_urothelial,colorectal,breast,lymphoid_neoplasm, melanoma,sarcoma,upper_gi,renal,cervical,multiple_myeloma, anorectal,non_cancer,liver_bileduct

SEQ ID NO: 476121 - DNA, 20 bp, Homo sapiens
  chr15:31620725-31620745
  hypo
  prostate vs. upper_gi
cggaaaggaatgccctggcc

SEQ ID NO: 476122 - DNA, 247 bp, Homo sapiens; identical to SEQ ID NO: 373600
  chr15:31620800-31621047
  hypo
  prostate vs. upper_gi

SEQ ID NO: 476123 - DNA, 1 bp, Homo sapiens
  chr15:40676552-40676553
  hypo
  prostate vs. pancreas_gallbladder
c

SEQ ID NO: 476124 - DNA, 103 bp, Homo sapiens; identical to SEQ ID NO: 355245
  chr15:40676583-40676686
  hypo
  prostate vs. pancreas_gallbladder

SEQ ID NO: 476125 - DNA, 275 bp, Homo sapiens; identical to SEQ ID NO: 459430
  chr15:45670188-45670463
  hypo
  prostate vs. liver_bileduct

SEQ ID NO: 476126 - DNA, 76 bp, Homo sapiens; identical to SEQ ID NO: 342212
  chr15:63695768-63695844
  hypo
  prostate vs. liver_bileduct,sarcoma,uterine,colorectal, ovary

SEQ ID NO: 476127 - DNA, 7 bp, Homo sapiens
  chr15:72564635-72564642
  hypo
  prostate vs. lymphoid_neoplasm
cgctctg

SEQ ID NO: 476128 - DNA, 17 bp, Homo sapiens
  chr15:101785799-101785816
  hypo
  prostate vs. lung,cervical,bladder_and_urothelial
cgtgaagctgccggtgc

SEQ ID NO: 476129 - DNA, 247 bp, Homo sapiens; identical to SEQ ID NO: 342318
  chr15:101938625-101938872
  hypo
  prostate vs. liver_bileduct

SEQ ID NO: 476130 - DNA, 5 bp, Homo sapiens
  chr16:666708-666713
  hypo
  prostate vs. melanoma,liver_bileduct
cgaga

SEQ ID NO: 476131 - DNA, 78 bp, Homo sapiens; identical to SEQ ID NO: 465160
  chr16:667407-667485
  hypo
  prostate vs. melanoma,liver_bileduct

SEQ ID NO: 476132 - DNA, 53 bp, Homo sapiens; identical to SEQ ID NO: 342385
  chr16:1472227-1472280
  hypo
  prostate vs. lymphoid_neoplasm,sarcoma,melanoma,renal, multiple_myeloma,non_cancer

SEQ ID NO: 476133 - DNA, 195 bp, Homo sapiens; identical to SEQ ID NO: 456532
  chr16:1730112-1730307
  hypo
  prostate vs. melanoma,multiple_myeloma,colorectal, lymphoid_neoplasm,non_cancer

SEQ ID NO: 476134 - DNA, 105 bp, Homo sapiens; identical to SEQ ID NO: 346116
  chr16:1730761-1730866
  hypo
  prostate vs. melanoma,multiple_myeloma,colorectal, lymphoid_neoplasm,non_cancer

SEQ ID NO: 476135 - DNA, 1 bp, Homo sapiens
  chr16:2029207-2029208
  hypo
  prostate vs. lymphoid_neoplasm
c

SEQ ID NO: 476136 - DNA, 73 bp, Homo sapiens; identical to SEQ ID NO: 454826
  chr16:2278311-2278384
  hypo
  prostate vs. renal,sarcoma

SEQ ID NO: 476137 - DNA, 2 bp, Homo sapiens
  chr16:4092829-4092831
  hypo
  prostate vs. breast,upper_gi,lung,lymphoid_neoplasm, colorectal,renal,liver_bileduct,melanoma,pancreas_gallbladder, bladder_and_urothelial,anorectal
cg

SEQ ID NO: 476138 - DNA, 125 bp, Homo sapiens
  chr16:4092845-4092970
  hypo
  prostate vs. breast,upper_gi,lung,lymphoid_neoplasm, colorectal,renal,liver_bileduct,melanoma,pancreas_gallbladder, bladder_and_urothelial,anorectal
gttttggtctgctaacttatcaactgtatgatttgggcaagttcctaaacttctctgtgcttcgtttctcccctttgtaaaacaggactaaaaatattaaaactcggccgggcgcagtggctcac

SEQ ID NO: 476139 - DNA, 176 bp, Homo sapiens; identical to SEQ ID NO: 342463
  chr16:4478626-4478802
  hypo
  prostate vs. ovary

SEQ ID NO: 476140 - DNA, 59 bp, Homo sapiens; identical to SEQ ID NO: 342467
  chr16:4719497-4719556
  hypo
  prostate vs. upper_gi,melanoma,head_and_neck,sarcoma, cervical,lung,colorectal

SEQ ID NO: 476141 - DNA, 414 bp, Homo sapiens; identical to SEQ ID NO: 342478
  chr16:8995963-8996377
  hypo
  prostate vs. lung,upper_gi

SEQ ID NO: 476142 - DNA, 77 bp, Homo sapiens
  chr16:11974709-11974786
  hypo
  prostate vs. lung,breast,pancreas_gallbladder, liver_bileduct,lymphoid_neoplasm,bladder_and_urothelial, colorectal,renal,uterine,head_and_neck,upper_gi,ovary, multiple_myeloma,sarcoma
cgtaggttgccaaccccatgaattttttattgtaaaagtctggcctcttttttatttgatatttgagacggagtctc

SEQ ID NO: 476143 - DNA, 349 bp, Homo sapiens; identical to SEQ ID NO: 335295
  chr16:14396725-14397074
  hypo
  prostate vs. breast

SEQ ID NO: 476144 - DNA, 156 bp, Homo sapiens; identical to SEQ ID NO: 342524
  chr16:23402123-23402279
  hypo
  prostate vs. melanoma

SEQ ID NO: 476145 - DNA, 10 bp, Homo sapiens
  chr16:23846783-23846793
  hypo
  prostate vs. non_cancer,myeloid_neoplasm,thyroid
cgctcctccc

SEQ ID NO: 476146 - DNA, 43 bp, Homo sapiens; identical to SEQ ID NO: 355440
  chr16:27539990-27540033
  hypo
  prostate vs. pancreas_gallbladder,liver_bileduct

SEQ ID NO: 476147 - DNA, 69 bp, Homo sapiens; identical to SEQ ID NO: 381212
  chr16:49767035-49767104
  hypo
  prostate vs. breast

SEQ ID NO: 476148 - DNA, 163 bp, Homo sapiens; identical to SEQ ID NO: 342579
  chr16:53337696-53337859
  hypo
  prostate vs. sarcoma,liver_bileduct

SEQ ID NO: 476149 - DNA, 107 bp, Homo sapiens; identical to SEQ ID NO: 342590
  chr16:56782274-56782381
  hypo
  prostate vs. head_and_neck,cervical, bladder_and_urothelial,breast,lymphoid_neoplasm,uterine, colorectal

SEQ ID NO: 476150 - DNA, 72 bp, Homo sapiens; identical to SEQ ID NO: 342600
  chr16:58558309-58558381
  hypo
  prostate vs. liver_bileduct,lung,breast,renal, pancreas_gallbladder,bladder_and_urothelial,head_and_neck, uterine,cervical,upper_gi,colorectal,anorectal,ovary, lymphoid_neoplasm

SEQ ID NO: 476151 - DNA, 134 bp, Homo sapiens; identical to SEQ ID NO: 345495
  chr16:68118915-68119049
  hypo
  prostate vs. anorectal,cervical,multiple_myeloma, non_cancer,uterine,myeloid_neoplasm,upper_gi

SEQ ID NO: 476152 - DNA, 310 bp, Homo sapiens; identical to SEQ ID NO: 355481
  chr16:70811523-70811833
  hypo
  prostate vs. lung,upper_gi,cervical,renal

SEQ ID NO: 476153 - DNA, 284 bp, Homo sapiens; identical to SEQ ID NO: 342652
  chr16:77227386-77227670
  hypo
  prostate vs. lung

SEQ ID NO: 476154 - DNA, 346 bp, Homo sapiens; identical to SEQ ID NO: 342684
  chr16:84813536-84813882
  hypo
  prostate vs. upper_gi,renal,bladder_and_urothelial, head_and_neck,sarcoma,lung,cervical,melanoma,anorectal, lymphoid_neoplasm,colorectal,pancreas_gallbladder,non_cancer, liver_bileduct,ovary,uterine,myeloid_neoplasm

SEQ ID NO: 476155 - DNA, 465 bp, Homo sapiens; identical to SEQ ID NO: 455747
  chr16:87417704-87418169
  hypo
  prostate vs. sarcoma,cervical,ovary,anorectal, lymphoid_neoplasm,myeloid_neoplasm,uterine,lung,non_cancer

SEQ ID NO: 476156 - DNA, 50 bp, Homo sapiens; identical to SEQ ID NO: 351854
  chr16:87418200-87418250
  hypo
  prostate vs. sarcoma,cervical,ovary,anorectal, lymphoid_neoplasm,myeloid_neoplasm,uterine,lung,non_cancer

SEQ ID NO: 476157 - DNA, 171 bp, Homo sapiens; identical to SEQ ID NO: 456592
  chr16:88106152-88106323
  hypo
  prostate vs. liver_bileduct,lung,upper_gi

SEQ ID NO: 476158 - DNA, 96 bp, Homo sapiens; identical to SEQ ID NO: 346151
  chr16:88106398-88106494
  hypo
  prostate vs. liver_bileduct,lung,upper_gi

SEQ ID NO: 476159 - DNA, 328 bp, Homo sapiens; identical to SEQ ID NO: 342740
  chr16:88111298-88111626
  hypo
  prostate vs. colorectal,lung,upper_gi,renal,melanoma, pancreas_gallbladder,multiple_myeloma,head_and_neck,uterine, cervical,liver_bileduct,ovary

SEQ ID NO: 476160 - DNA, 1 bp, Homo sapiens
  chr16:89575936-89575937
  hypo
  prostate vs. melanoma,renal,lymphoid_neoplasm
c

SEQ ID NO: 476161 - DNA, 155 bp, Homo sapiens; identical to SEQ ID NO: 342819
  chr17:1241096-1241251
  hypo
  prostate vs. renal

SEQ ID NO: 476162 - DNA, 270 bp, Homo sapiens; identical to SEQ ID NO: 342821
  chr17:1407895-1408165
  hypo
  prostate vs. liver_bileduct,bladder_and_urothelial, pancreas_gallbladder,sarcoma,lymphoid_neoplasm,cervical,ovary, melanoma,lung,uterine,upper_gi,non_cancer,thyroid,head_and_neck, breast,renal,colorectal,multiple_myeloma

SEQ ID NO: 476163 - DNA, 322 bp, Homo sapiens; identical to SEQ ID NO: 342846
  chr17:4048756-4049078
  hypo
  prostate vs. cervical,ovary,breast,pancreas_gallbladder, uterine,lymphoid_neoplasm,melanoma,bladder_and_urothelial,renal, upper_gi

SEQ ID NO: 476164 - DNA, 515 bp, Homo sapiens; identical to SEQ ID NO: 360937
  chr17:4853391-4853906
  hypo
  prostate vs. upper_gi,colorectal,lung, bladder_and_urothelial,renal,melanoma,cervical

SEQ ID NO: 476165 - DNA, 101 bp, Homo sapiens; identical to SEQ ID NO: 342872
  chr17:7807194-7807295
  hypo
  prostate vs. pancreas_gallbladder,upper_gi

SEQ ID NO: 476166 - DNA, 119 bp, Homo sapiens; identical to SEQ ID NO: 342890
  chr17:12032523-12032642
  hypo
  prostate vs. pancreas_gallbladder,breast,colorectal, melanoma,head_and_neck,upper_gi,lung,cervical,liver_bileduct, lymphoid_neoplasm,bladder_and_urothelial

SEQ ID NO: 476167 - DNA, 210 bp, Homo sapiens; identical to SEQ ID NO: 342903
  chr17:17104713-17104923
  hypo
  prostate vs. liver_bileduct,pancreas_gallbladder, melanoma,lung,ovary,cervical,breast,colorectal,renal, bladder_and_urothelial,upper_gi,lymphoid_neoplasm,head_and_neck, sarcoma,uterine,thyroid,non_cancer

SEQ ID NO: 476168 - DNA, 226 bp, Homo sapiens; identical to SEQ ID NO: 367185
  chr17:17120248-17120474
  hypo
  prostate vs. head_and_neck,liver_bileduct

SEQ ID NO: 476169 - DNA, 112 bp, Homo sapiens; identical to SEQ ID NO: 342918
  chr17:19513145-19513257
  hypo
  prostate vs. liver_bileduct

SEQ ID NO: 476170 - DNA, 226 bp, Homo sapiens; identical to SEQ ID NO: 342923
  chr17:20903670-20903896
  hypo
  prostate vs. bladder_and_urothelial,pancreas_gallbladder, melanoma,sarcoma,uterine,ovary

SEQ ID NO: 476171 - DNA, 232 bp, Homo sapiens; identical to SEQ ID NO: 355615
  chr17:21104115-21104347
  hypo
  prostate vs. melanoma

SEQ ID NO: 476172 - DNA, 126 bp, Homo sapiens; identical to SEQ ID NO: 342952
  chr17:30804383-30804509
  hypo
  prostate vs. liver_bileduct,head_and_neck,breast, melanoma,lung,upper_gi,colorectal,renal,ovary,sarcoma, pancreas_gallbladder

SEQ ID NO: 476173 - DNA, 130 bp, Homo sapiens; identical to SEQ ID NO: 342960
  chr17:35545278-35545408
  hypo
  prostate vs. bladder_and_urothelial,melanoma,sarcoma, lung,cervical,ovary,upper_gi,lymphoid_neoplasm,anorectal

SEQ ID NO: 476174 - DNA, 63 bp, Homo sapiens; identical to SEQ ID NO: 475478
  chr17:42402710-42402773
  hypo
  prostate vs. ovary,lymphoid_neoplasm,multiple_myeloma, thyroid,myeloid_neoplasm,anorectal,cervical,head_and_neck,lung, non_cancer,colorectal,upper_gi,uterine

SEQ ID NO: 476175 - DNA, 192 bp, Homo sapiens; identical to SEQ ID NO: 347435
  chr17:42402917-42403109
  hypo
  prostate vs. ovary,lymphoid_neoplasm,multiple_myeloma, thyroid,myeloid_neoplasm,anorectal,cervical,head_and_neck,lung, non_cancer,colorectal,upper_gi,uterine

SEQ ID NO: 476176 - DNA, 59 bp, Homo sapiens; identical to SEQ ID NO: 343005
  chr17:45689891-45689950
  hypo
  prostate vs. breast

SEQ ID NO: 476177 - DNA, 267 bp, Homo sapiens; identical to SEQ ID NO: 374206
  chr17:49008887-49009154
  hypo
  prostate vs. pancreas_gallbladder

SEQ ID NO: 476178 - DNA, 134 bp, Homo sapiens; identical to SEQ ID NO: 343028
  chr17:49281042-49281176
  hypo
  prostate vs. lung,pancreas_gallbladder,head_and_neck, liver_bileduct,breast,bladder_and_urothelial,ovary,uterine, renal

SEQ ID NO: 476179 - DNA, 266 bp, Homo sapiens; identical to SEQ ID NO: 343035
  chr17:55917220-55917486
  hypo
  prostate vs. lung,lymphoid_neoplasm,ovary,colorectal, cervical,bladder_and_urothelial,upper_gi,sarcoma

SEQ ID NO: 476180 - DNA, 40 bp, Homo sapiens; identical to SEQ ID NO: 343044
  chr17:57948205-57948245
  hypo
  prostate vs. anorectal

SEQ ID NO: 476181 - DNA, 41 bp, Homo sapiens; identical to SEQ ID NO: 468883
  chr17:60885408-60885449
  hypo
  prostate vs. uterine,colorectal

SEQ ID NO: 476182 - DNA, 308 bp, Homo sapiens; identical to SEQ ID NO: 347460
  chr17:60885548-60885856
  hypo
  prostate vs. uterine,colorectal

SEQ ID NO: 476183 - DNA, 104 bp, Homo sapiens; identical to SEQ ID NO: 361115
  chr17:61553834-61553938
  hypo
  prostate vs. colorectal,uterine

SEQ ID NO: 476184 - DNA, 48 bp, Homo sapiens; identical to SEQ ID NO: 475493
  chr17:61553940-61553988
  hypo
  prostate vs. colorectal,uterine

SEQ ID NO: 476185 - DNA, 322 bp, Homo sapiens; identical to SEQ ID NO: 361117
  chr17:61554094-61554416
  hypo
  prostate vs. colorectal,uterine

SEQ ID NO: 476186 - DNA, 112 bp, Homo sapiens; identical to SEQ ID NO: 454237
  chr17:61777761-61777873
  hypo
  prostate vs. cervical

SEQ ID NO: 476187 - DNA, 76 bp, Homo sapiens; identical to SEQ ID NO: 345537
  chr17:61778423-61778499
  hypo
  prostate vs. cervical

SEQ ID NO: 476188 - DNA, 128 bp, Homo sapiens; identical to SEQ ID NO: 343057
  chr17:61817226-61817354
  hypo
  prostate vs. melanoma

SEQ ID NO: 476189 - DNA, 95 bp, Homo sapiens; identical to SEQ ID NO: 381716
  chr17:66426282-66426377
  hypo
  prostate vs. breast

SEQ ID NO: 476190 - DNA, 425 bp, Homo sapiens; identical to SEQ ID NO: 343072
  chr17:66440125-66440550
  hypo
  prostate vs. lymphoid_neoplasm

SEQ ID NO: 476191 - DNA, 201 bp, Homo sapiens; identical to SEQ ID NO: 355689
  chr17:71201650-71201851
  hypo
  prostate vs. melanoma

SEQ ID NO: 476192 - DNA, 81 bp, Homo sapiens; identical to SEQ ID NO: 454240
  chr17:73584287-73584368
  hypo
  prostate vs. cervical

SEQ ID NO: 476193 - DNA, 170 bp, Homo sapiens; identical to SEQ ID NO: 352021
  chr17:73584951-73585121
  hypo
  prostate vs. cervical

SEQ ID NO: 476194 - DNA, 84 bp, Homo sapiens
  chr17:76100954-76101038
  hypo
  prostate vs. liver_bileduct
cgacccctcccgggacccctcccggctgggcggccccacagacccgctggaacccagcagcggccgcccttttgagtacctctg

SEQ ID NO: 476195 - DNA, 632 bp, Homo sapiens; identical to SEQ ID NO: 460174
  chr17:76992727-76993359
  hypo
  prostate vs. liver_bileduct,sarcoma,head_and_neck, uterine,melanoma,cervical,bladder_and_urothelial,breast,ovary, anorectal

SEQ ID NO: 476196 - DNA, 142 bp, Homo sapiens; identical to SEQ ID NO: 348846
  chr17:76993419-76993561
  hypo
  prostate vs. liver_bileduct,sarcoma,head_and_neck, uterine,melanoma,cervical,bladder_and_urothelial,breast,ovary, anorectal

SEQ ID NO: 476197 - DNA, 277 bp, Homo sapiens; identical to SEQ ID NO: 474755
  chr17:76993082-76993359
  hypo
  prostate vs. head_and_neck,liver_bileduct,sarcoma

SEQ ID NO: 476198 - DNA, 478 bp, Homo sapiens; identical to SEQ ID NO: 218133
  chr17:76993419-76993897
  hypo
  prostate vs. head_and_neck,liver_bileduct,sarcoma

SEQ ID NO: 476199 - DNA, 286 bp, Homo sapiens
  chr17:76996197-76996483
  hypo
  prostate vs. bladder_and_urothelial,head_and_neck, anorectal,uterine,renal
cgtcttagacatttcaagacacgagtcctgtgcagcttttccctcaagcctacttgctcctcgtctccccttgggaagggtagtggtgacgggtggccaccgtgtccacagtggtctggttcaagctctctcaggatcctgggagatgtgcttttctgtgtgaatatacacttcgataaaaacataaggcactgccaccacgaaaaacctgactggcctcatcctccgtcttccttcctcagcattgactccgtggacaggttctgtcctcttccatggcccttcc

SEQ ID NO: 476200 - DNA, 413 bp, Homo sapiens
  chr17:76996567-76996980
  hypo
  prostate vs. bladder_and_urothelial,head_and_neck, anorectal,uterine,renal
ctgccagctgccccccaccaacatcccctgacactccctcgccacctgccatgaagtagcatccatcagatggcacactcccagcttcagcggcttcctcaggtcctggggtgaacccactctgctcccgctcagccctcacactgtaccatctcctctgcctgccggctggctacatagacctccttctgtcccctgaccacactggccctggcagagcctgcagttccccctgcctggaacagtcgggcctgctcttcgcaccagcagctcggtctctcctacggggcatcagctccctgggaagacttgcccactcgccctccctcccatgccgctccggctctcccaccgtccctgcctggctaggtgattatttctgctcctggggcagggatctggccactgtcaca

SEQ ID NO: 476201 - DNA, 117 bp, Homo sapiens
  chr17:76997041-76997158
  hypo
  prostate vs. bladder_and_urothelial,head_and_neck, anorectal,uterine,renal
gaaagagatgccaggtgagccattagccacttcttcaacagcccctctgcactctaccgggggccccaccttaggcatattatgaacccacaacctggatcaagcaccccaaagatc

SEQ ID NO: 476202 - DNA, 285 bp, Homo sapiens
  chr17:76996695-76996980
  hypo
  prostate vs. bladder_and_urothelial,melanoma,uterine, head_and_neck,cervical,anorectal,renal,liver_bileduct, lymphoid_neoplasm,sarcoma,myeloid_neoplasm
cgctcagccctcacactgtaccatctcctctgcctgccggctggctacatagacctccttctgtcccctgaccacactggccctggcagagcctgcagttccccctgcctggaacagtcgggcctgctcttcgcaccagcagctcggtctctcctacggggcatcagctccctgggaagacttgcccactcgccctccctcccatgccgctccggctctcccaccgtccctgcctggctaggtgattatttctgctcctggggcagggatctggccactgtcaca

SEQ ID NO: 476203 - DNA, 531 bp, Homo sapiens
  chr17:76997041-76997572
  hypo
  prostate vs. bladder_and_urothelial,melanoma,uterine, head_and_neck,cervical,anorectal,renal,liver_bileduct, lymphoid_neoplasm,sarcoma,myeloid_neoplasm
gaaagagatgccaggtgagccattagccacttcttcaacagcccctctgcactctaccgggggccccaccttaggcatattatgaacccacaacctggatcaagcaccccaaagatcgagctgctcagctgccacatctgagctgcaggcccgggaagacggtgcttgccagcacagaacaacggtgcctgcatagactgctgtcagacatcgtgaggtgtcgtcgtcaccagcccctggaacccccatgttcttccctgttcaactccctcagcactccggagagccactgtcctcaccttcaccattcctgtcaaatctccggcccacttctcccaggagaccactctgtggccaacttcagcagccgaggcccctgggtggggctcacacctgccactcaggtcagtccccccagccgccgggcacctgctcttctggttcctcccttccatccacaggctgccccaagtcgcccaccttgtcaccattttacctccagaccccacactcccacagacactcaactgc

SEQ ID NO: 476204 - DNA, 24 bp, Homo sapiens
  chr17:76997601-76997625
  hypo
  prostate vs. bladder_and_urothelial,melanoma,uterine, head_and_neck,cervical,anorectal,renal,liver_bileduct, lymphoid_neoplasm,sarcoma,myeloid_neoplasm
aggaaaacccttccctgagtcccc

SEQ ID NO: 476205 - DNA, 261 bp, Homo sapiens; identical to SEQ ID NO: 343164
  chr17:76998502-76998763
  hypo
  prostate vs. liver_bileduct,lung,bladder_and_urothelial, renal,head_and_neck,lymphoid_neoplasm,cervical,sarcoma

SEQ ID NO: 476206 - DNA, 50 bp, Homo sapiens; identical to SEQ ID NO: 355744
  chr17:77808028-77808078
  hypo
  prostate vs. melanoma

SEQ ID NO: 476207 - DNA, 353 bp, Homo sapiens; identical to SEQ ID NO: 474762
  chr17:78041114-78041467
  hypo
  prostate vs. bladder_and_urothelial

SEQ ID NO: 476208 - DNA, 200 bp, Homo sapiens; identical to SEQ ID NO: 367420
  chr17:78041496-78041696
  hypo
  prostate vs. bladder_and_urothelial

SEQ ID NO: 476209 - DNA, 566 bp, Homo sapiens; identical to SEQ ID NO: 456645
  chr17:78271713-78272279
  hypo
  prostate vs. bladder_and_urothelial,upper_gi,cervical, liver_bileduct,melanoma,pancreas_gallbladder,colorectal,renal, uterine

SEQ ID NO: 476210 - DNA, 77 bp, Homo sapiens; identical to SEQ ID NO: 348852
  chr17:78272313-78272390
  hypo
  prostate vs. bladder_and_urothelial,upper_gi,cervical, liver_bileduct,melanoma,pancreas_gallbladder,colorectal,renal, uterine

SEQ ID NO: 476211 - DNA, 764 bp, Homo sapiens; identical to SEQ ID NO: 343243
  chr17:80019114-80019878
  hypo
  prostate vs. uterine,breast,cervical,lung

SEQ ID NO: 476212 - DNA, 863 bp, Homo sapiens; identical to SEQ ID NO: 367461
  chr17:80045799-80046662
  hypo
  prostate vs. lung,upper_gi

SEQ ID NO: 476213 - DNA, 161 bp, Homo sapiens; identical to SEQ ID NO: 381895
  chr17:80049199-80049360
  hypo
  prostate vs. lung

SEQ ID NO: 476214 - DNA, 940 bp, Homo sapiens; identical to SEQ ID NO: 343246
  chr17:80050751-80051691
  hypo
  prostate vs. upper_gi,lung,colorectal,ovary

SEQ ID NO: 476215 - DNA, 230 bp, Homo sapiens; identical to SEQ ID NO: 456651
  chr17:80394871-80395101
  hypo
  prostate vs. melanoma,renal

SEQ ID NO: 476216 - DNA, 82 bp, Homo sapiens; identical to SEQ ID NO: 355773
  chr17:80395146-80395228
  hypo
  prostate vs. melanoma,renal

SEQ ID NO: 476217 - DNA, 223 bp, Homo sapiens; identical to SEQ ID NO: 343256
  chr17:80517124-80517347
  hypo
  prostate vs. renal,breast,bladder_and_urothelial, head_and_neck

SEQ ID NO: 476218 - DNA, 278 bp, Homo sapiens; identical to SEQ ID NO: 462576
  chr17:81038567-81038845
  hypo
  prostate vs. bladder_and_urothelial,ovary

SEQ ID NO: 476219 - DNA, 508 bp, Homo sapiens; identical to SEQ ID NO: 352045
  chr17:81038865-81039373
  hypo
  prostate vs. bladder_and_urothelial,ovary

SEQ ID NO: 476220 - DNA, 196 bp, Homo sapiens; identical to SEQ ID NO: 343328
  chr18:9569216-9569412
  hypo
  prostate vs. lung,breast,renal

SEQ ID NO: 476221 - DNA, 3 bp, Homo sapiens
  chr18:9708731-9708734
  hypo
  prostate vs. cervical,anorectal,non_cancer,breast, thyroid,bladder_and_urothelial
cgg

SEQ ID NO: 476222 - DNA, 165 bp, Homo sapiens; identical to SEQ ID NO: 343346
  chr18:13033480-13033645
  hypo
  prostate vs. upper_gi,colorectal,breast,lung,renal, head_and_neck,bladder_and_urothelial,lymphoid_neoplasm, liver_bileduct,anorectal,melanoma,ovary,uterine

SEQ ID NO: 476223 - DNA, 52 bp, Homo sapiens; identical to SEQ ID NO: 456662
  chr18:13826252-13826304
  hypo
  prostate vs. sarcoma

SEQ ID NO: 476224 - DNA, 79 bp, Homo sapiens; identical to SEQ ID NO: 355828
  chr18:13826592-13826671
  hypo
  prostate vs. sarcoma

SEQ ID NO: 476225 - DNA, 459 bp, Homo sapiens; identical to SEQ ID NO: 475515
  chr18:20716114-20716573
  hypo
  prostate vs. upper_gi,breast,ovary

SEQ ID NO: 476226 - DNA, 186 bp, Homo sapiens; identical to SEQ ID NO: 361221
  chr18:20716690-20716876
  hypo
  prostate vs. upper_gi,breast,ovary

SEQ ID NO: 476227 - DNA, 284 bp, Homo sapiens; identical to SEQ ID NO: 343386
  chr18:46418923-46419207
  hypo
  prostate vs. breast,colorectal

SEQ ID NO: 476228 - DNA, 115 bp, Homo sapiens; identical to SEQ ID NO: 346183
  chr18:55850987-55851102
  hypo
  prostate vs. melanoma,liver_bileduct

SEQ ID NO: 476229 - DNA, 133 bp, Homo sapiens; identical to SEQ ID NO: 454945
  chr18:74113780-74113913
  hypo
  prostate vs. liver_bileduct

SEQ ID NO: 476230 - DNA, 61 bp, Homo sapiens; identical to SEQ ID NO: 454946
  chr18:74113942-74114003
  hypo
  prostate vs. liver_bileduct

SEQ ID NO: 476231 - DNA, 233 bp, Homo sapiens; identical to SEQ ID NO: 453785
  chr19:1978023-1978256
  hypo
  prostate vs. lymphoid_neoplasm,renal,melanoma

SEQ ID NO: 476232 - DNA, 116 bp, Homo sapiens; identical to SEQ ID NO: 345560
  chr19:1979018-1979134
  hypo
  prostate vs. lymphoid_neoplasm,melanoma,renal

SEQ ID NO: 476233 - DNA, 435 bp, Homo sapiens; identical to SEQ ID NO: 361375
  chr19:2488689-2489124
  hypo
  prostate vs. thyroid

SEQ ID NO: 476234 - DNA, 324 bp, Homo sapiens; identical to SEQ ID NO: 367796
  chr19:2795325-2795649
  hypo
  prostate vs. lung,upper_gi,sarcoma

SEQ ID NO: 476235 - DNA, 577 bp, Homo sapiens; identical to SEQ ID NO: 343611
  chr19:2796376-2796953
  hypo
  prostate vs. melanoma

SEQ ID NO: 476236 - DNA, 122 bp, Homo sapiens; identical to SEQ ID NO: 343658
  chr19:4934661-4934783
  hypo
  prostate vs. liver_bileduct

SEQ ID NO: 476237 - DNA, 415 bp, Homo sapiens; identical to SEQ ID NO: 355988
  chr19:5269156-5269571
  hypo
  prostate vs. melanoma,sarcoma,cervical,uterine,renal

SEQ ID NO: 476238 - DNA, 439 bp, Homo sapiens; identical to SEQ ID NO: 475529
  chr19:5608081-5608520
  hypo
  prostate vs. sarcoma,melanoma

SEQ ID NO: 476239 - DNA, 229 bp, Homo sapiens; identical to SEQ ID NO: 348929
  chr19:5608569-5608798
  hypo
  prostate vs. sarcoma,melanoma

SEQ ID NO: 476240 - DNA, 84 bp, Homo sapiens; identical to SEQ ID NO: 343669
  chr19:5630448-5630532
  hypo
  prostate vs. bladder_and_urothelial,breast,ovary,sarcoma, lung,multiple_myeloma,cervical,melanoma,anorectal,renal, head_and_neck,colorectal

SEQ ID NO: 476241 - DNA, 311 bp, Homo sapiens; identical to SEQ ID NO: 343677
  chr19:5938115-5938426
  hypo
  prostate vs. melanoma,breast,liver_bileduct,lung, head_and_neck,lymphoid_neoplasm,thyroid,ovary,non_cancer, anorectal

SEQ ID NO: 476242 - DNA, 126 bp, Homo sapiens; identical to SEQ ID NO: 343687
  chr19:6020529-6020655
  hypo
  prostate vs. renal

SEQ ID NO: 476243 - DNA, 271 bp, Homo sapiens; identical to SEQ ID NO: 367883
  chr19:7685308-7685579
  hypo
  prostate vs. liver_bileduct

SEQ ID NO: 476244 - DNA, 212 bp, Homo sapiens; identical to SEQ ID NO: 455816
  chr19:10197461-10197673
  hypo
  prostate vs. multiple_myeloma,bladder_and_urothelial, cervical,anorectal,non_cancer,thyroid,myeloid_neoplasm,upper_gi, renal

SEQ ID NO: 476245 - DNA, 154 bp, Homo sapiens; identical to SEQ ID NO: 456722
  chr19:11008216-11008370
  hypo
  prostate vs. sarcoma,uterine,lymphoid_neoplasm

SEQ ID NO: 476246 - DNA, 385 bp, Homo sapiens; identical to SEQ ID NO: 356027
  chr19:11030249-11030634
  hypo
  prostate vs. sarcoma

SEQ ID NO: 476247 - DNA, 125 bp, Homo sapiens; identical to SEQ ID NO: 343757
  chr19:11172767-11172892
  hypo
  prostate vs. lung,head_and_neck,breast,liver_bileduct, pancreas_gallbladder

SEQ ID NO: 476248 - DNA, 610 bp, Homo sapiens; identical to SEQ ID NO: 335981
  chr19:12900128-12900738
  hypo
  prostate vs. upper_gi,pancreas_gallbladder, liver_bileduct,head_and_neck,breast,colorectal

SEQ ID NO: 476249 - DNA, 645 bp, Homo sapiens; identical to SEQ ID NO: 343777
  chr19:13108022-13108667
  hypo
  prostate vs. liver_bileduct

SEQ ID NO: 476250 - DNA, 750 bp, Homo sapiens
  chr19:13109260-13110010
  hypo
  prostate vs. melanoma,pancreas_gallbladder,colorectal, ovary,bladder_and_urothelial,anorectal,lymphoid_neoplasm, liver_bileduct
cgagggggaagggcggggggaaaaatctccttctagaaaaagcatcgaaattcagggcggccgggtggggcggttcctggagctgctggagtccattgtagccacagtcctgagtctcaggcggagagaggggtggggggtggatggatggacccccatccccatcccaaccctgccaagaaacagagacacaaccaggatgtgaactcacgtacaccaccatcaccgccaagatggggatgtaagtgtcctgttcacaccgatgtccagacccacgaccatcgacgagcctacagacctacggacacaggaaaccgacgacttgtgttcacactgtcacacacacccattaacacacacgcacctcttgaaatgggacacgtatattggtgtaggcttagcgacacagcagtacctctttgacgcacgtatggacacaggaaactgtggacttgtgttcacaaccacccccagcgcacacataaacactcacaaacccctcgagatgatacagatagcgacgaaggcacatggagaccacgacacctcccagactcatggagccctgagcacatgcttggatacaggtagacacaaatgtgtgttcacccccacacatgctcacatggacccaaggacggacaggcggatggatggatacacatctttacacagagacataatgcagttggctcgctcaggtgtgtacacaaataacttttctttttctattttttttttttttgagac

SEQ ID NO: 476251 - DNA, 154 bp, Homo sapiens; identical to SEQ ID NO: 343779
  chr19:13110344-13110498
  hypo
  prostate vs. melanoma,renal

SEQ ID NO: 476252 - DNA, 171 bp, Homo sapiens; identical to SEQ ID NO: 343780
  chr19:13110794-13110965
  hypo

SEQ ID NO: 476253 - DNA, 857 bp, Homo sapiens; identical to SEQ ID NO: 475538
  chr19:13265772-13266629
  hypo
  prostate vs. upper_gi,breast,colorectal

SEQ ID NO: 476254 - DNA, 872 bp, Homo sapiens; identical to SEQ ID NO: 475539
  chr19:13266157-13267029
  hypo
  prostate vs. lymphoid_neoplasm,multiple_myeloma, myeloid_neoplasm,anorectal,breast,non_cancer,uterine,upper_gi

SEQ ID NO: 476255 - DNA, 324 bp, Homo sapiens; identical to SEQ ID NO: 335997
  chr19:15235629-15235953
  hypo
  prostate vs. colorectal,bladder_and_urothelial, multiple_myeloma,sarcoma,pancreas_gallbladder,renal,cervical, upper_gi,uterine,anorectal,liver_bileduct,non_cancer,ovary, myeloid_neoplasm,thyroid,lung,lymphoid_neoplasm

SEQ ID NO: 476256 - DNA, 102 bp, Homo sapiens; identical to SEQ ID NO: 205249
  chr19:16187000-16187102
  hypo
  prostate vs. lung,sarcoma,lymphoid_neoplasm,non_cancer, anorectal,renal,multiple_myeloma,myeloid_neoplasm,thyroid, uterine,ovary,cervical,head_and_neck,melanoma,colorectal, liver_bileduct

SEQ ID NO: 476257 - DNA, 517 bp, Homo sapiens; identical to SEQ ID NO: 454284
  chr19:16187104-16187621
  hypo
  prostate vs. lung,sarcoma,lymphoid_neoplasm,non_cancer, anorectal,renal,multiple_myeloma,myeloid_neoplasm,thyroid, uterine,ovary,cervical,head_and_neck,melanoma,colorectal, liver_bileduct

SEQ ID NO: 476258 - DNA, 148 bp, Homo sapiens; identical to SEQ ID NO: 454285
  chr19:16187640-16187788
  hypo
  prostate vs. lung,sarcoma,lymphoid_neoplasm,non_cancer, anorectal,renal,multiple_myeloma,myeloid_neoplasm,thyroid, uterine,ovary,cervical,head_and_neck,melanoma,colorectal, liver_bileduct

SEQ ID NO: 476259 - DNA, 329 bp, Homo sapiens; identical to SEQ ID NO: 454286
  chr19:16187292-16187621
  hypo
  prostate vs. lymphoid_neoplasm,lung,sarcoma, myeloid_neoplasm,anorectal,melanoma,non_cancer,thyroid, head_and_neck,multiple_myeloma,renal,ovary,uterine,cervical, bladder_and_urothelial,colorectal,upper_gi,liver_bileduct,
  CONT. FROM ABOVE: breast

SEQ ID NO: 476260 - DNA, 634 bp, Homo sapiens; identical to SEQ ID NO: 345579
  chr19:16187640-16188274
  hypo
  prostate vs. lymphoid_neoplasm,lung,sarcoma, myeloid_neoplasm,anorectal,melanoma,non_cancer,thyroid, head_and_neck,multiple_myeloma,renal,ovary,uterine,cervical, bladder_and_urothelial,colorectal,upper_gi,liver_bileduct,
  CONT. FROM ABOVE: breast

SEQ ID NO: 476261 - DNA, 172 bp, Homo sapiens; identical to SEQ ID NO: 343823
  chr19:16763531-16763703
  hypo
  prostate vs. anorectal,colorectal,liver_bileduct,lung

SEQ ID NO: 476262 - DNA, 376 bp, Homo sapiens; identical to SEQ ID NO: 343826
  chr19:17172577-17172953
  hypo
  prostate vs. lung,sarcoma,breast,head_and_neck,cervical, liver_bileduct,lymphoid_neoplasm,uterine,multiple_myeloma

SEQ ID NO: 476263 - DNA, 41 bp, Homo sapiens; identical to SEQ ID NO: 454998
  chr19:18241264-18241305
  hypo
  prostate vs. sarcoma,melanoma,multiple_myeloma,anorectal, colorectal,lymphoid_neoplasm,uterine,non_cancer,cervical,renal

SEQ ID NO: 476264 - DNA, 124 bp, Homo sapiens; identical to SEQ ID NO: 356073
  chr19:18241355-18241479
  hypo
  prostate vs. sarcoma,melanoma,multiple_myeloma,anorectal, colorectal,lymphoid_neoplasm,uterine,non_cancer,cervical,renal

SEQ ID NO: 476265 - DNA, 237 bp, Homo sapiens
  chr19:19156738-19156975
  hypo
  prostate vs. liver_bileduct,sarcoma,lymphoid_neoplasm, multiple_myeloma,melanoma
cgtgagccactatgcccggcctattatgctaaattcttaaaatatgttctcttaatctgtgctcagcccatcttgctggtgaggtatctgaggcttcccaaggatcagtgaccacgcccctgcaccccgaaaggtcagctggtgagaggcagagctggtacccggatccaggaagcaaagcactgaaaggccgttctaccagcagtacaggaaactccgtgtttgtttataacattc

SEQ ID NO: 476266 - DNA, 38 bp, Homo sapiens; identical to SEQ ID NO: 343904
  chr19:32849484-32849522
  hypo
  prostate vs. liver_bileduct

SEQ ID NO: 476267 - DNA, 158 bp, Homo sapiens; identical to SEQ ID NO: 343905
  chr19:32850587-32850745
  hypo
  prostate vs. lymphoid_neoplasm,liver_bileduct,upper_gi

SEQ ID NO: 476268 - DNA, 78 bp, Homo sapiens; identical to SEQ ID NO: 346209
  chr19:34949560-34949638
  hypo
  prostate vs. pancreas_gallbladder,head_and_neck, liver_bileduct,upper_gi,lymphoid_neoplasm,lung,uterine,breast, multiple_myeloma,myeloid_neoplasm,non_cancer

SEQ ID NO: 476269 - DNA, 68 bp, Homo sapiens; identical to SEQ ID NO: 336081
  chr19:35169531-35169599
  hypo
  prostate vs. renal,sarcoma

SEQ ID NO: 476270 - DNA, 324 bp, Homo sapiens; identical to SEQ ID NO: 348975
  chr19:38781936-38782260
  hypo
  prostate vs. pancreas_gallbladder,lymphoid_neoplasm, colorectal

SEQ ID NO: 476271 - DNA, 30 bp, Homo sapiens; identical to SEQ ID NO: 456767
  chr19:40829764-40829794
  hypo
  prostate vs. upper_gi,colorectal,liver_bileduct,renal

SEQ ID NO: 476272 - DNA, 89 bp, Homo sapiens; identical to SEQ ID NO: 454300
  chr19:46519167-46519256
  hypo
  prostate vs. anorectal,cervical

SEQ ID NO: 476273 - DNA, 421 bp, Homo sapiens; identical to SEQ ID NO: 352340
  chr19:46519582-46520003
  hypo
  prostate vs. anorectal,cervical

SEQ ID NO: 476274 - DNA, 112 bp, Homo sapiens; identical to SEQ ID NO: 344031
  chr19:47646754-47646866
  hypo
  prostate vs. melanoma,lymphoid_neoplasm,anorectal

SEQ ID NO: 476275 - DNA, 681 bp, Homo sapiens; identical to SEQ ID NO: 361653
  chr19:47729850-47730531
  hypo
  prostate vs. breast,bladder_and_urothelial,lung,melanoma, upper_gi

SEQ ID NO: 476276 - DNA, 287 bp, Homo sapiens; identical to SEQ ID NO: 336192
  chr19:47731303-47731590
  hypo
  prostate vs. upper_gi,lung,colorectal, bladder_and_urothelial,ovary,renal,breast

SEQ ID NO: 476277 - DNA, 202 bp, Homo sapiens; identical to SEQ ID NO: 344039
  chr19:48012665-48012867
  hypo
  prostate vs. renal

SEQ ID NO: 476278 - DNA, 550 bp, Homo sapiens; identical to SEQ ID NO: 336209
  chr19:49467064-49467614
  hypo
  prostate vs. upper_gi,colorectal,renal, pancreas_gallbladder,cervical,lymphoid_neoplasm, bladder_and_urothelial,anorectal

SEQ ID NO: 476279 - DNA, 60 bp, Homo sapiens; identical to SEQ ID NO: 382764
  chr19:49703657-49703717
  hypo
  prostate vs. bladder_and_urothelial

SEQ ID NO: 476280 - DNA, 133 bp, Homo sapiens; identical to SEQ ID NO: 356189
  chr19:49703923-49704056
  hypo
  prostate vs. sarcoma,renal,bladder_and_urothelial, anorectal,breast,liver_bileduct,upper_gi,pancreas_gallbladder, cervical

SEQ ID NO: 476281 - DNA, 78 bp, Homo sapiens; identical to SEQ ID NO: 356193
  chr19:50320125-50320203
  hypo
  prostate vs. melanoma

SEQ ID NO: 476282 - DNA, 67 bp, Homo sapiens; identical to SEQ ID NO: 348994
  chr19:50365162-50365229
  hypo
  prostate vs. multiple_myeloma,melanoma

SEQ ID NO: 476283 - DNA, 676 bp, Homo sapiens; identical to SEQ ID NO: 344078
  chr19:51303021-51303697
  hypo
  prostate vs. head_and_neck,liver_bileduct,lung, bladder_and_urothelial,breast,uterine,melanoma,cervical,sarcoma, colorectal,renal

SEQ ID NO: 476284 - DNA, 136 bp, Homo sapiens; identical to SEQ ID NO: 344087
  chr19:52406169-52406305
  hypo
  prostate vs. lung

SEQ ID NO: 476285 - DNA, 9 bp, Homo sapiens
  chr19:58874823-58874832
  hypo
  prostate vs. lymphoid_neoplasm,renal
cgagactcc

SEQ ID NO: 476286 - DNA, 90 bp, Homo sapiens; identical to SEQ ID NO: 337516
  chr2:9135660-9135750
  hypo
  prostate vs. lung,upper_gi,pancreas_gallbladder, lymphoid_neoplasm,colorectal,head_and_neck, bladder_and_urothelial,uterine,renal,ovary

SEQ ID NO: 476287 - DNA, 201 bp, Homo sapiens; identical to SEQ ID NO: 337523
  chr2:9720456-9720657
  hypo
  prostate vs. upper_gi,head_and_neck,liver_bileduct, lymphoid_neoplasm,anorectal

SEQ ID NO: 476288 - DNA, 185 bp, Homo sapiens; identical to SEQ ID NO: 459562
  chr2:12857960-12858145
  hypo
  prostate vs. cervical,thyroid

SEQ ID NO: 476289 - DNA, 1 bp, Homo sapiens
  chr2:12858681-12858682
  hypo
  prostate vs. cervical,thyroid
c

SEQ ID NO: 476290 - DNA, 17 bp, Homo sapiens
  chr2:27484883-27484900
  hypo
  prostate vs. uterine
cggacggtcagccgaca

SEQ ID NO: 476291 - DNA, 59 bp, Homo sapiens; identical to SEQ ID NO: 455879
  chr2:27938267-27938326
  hypo
  prostate vs. ovary,sarcoma,non_cancer

SEQ ID NO: 476292 - DNA, 22 bp, Homo sapiens
  chr2:29337909-29337931
  hypo
  prostate vs. anorectal,cervical
cgtgggtgtagcacggattagg

SEQ ID NO: 476293 - DNA, 38 bp, Homo sapiens; identical to SEQ ID NO: 454314
  chr2:30453530-30453568
  hypo
  prostate vs. myeloid_neoplasm,non_cancer,thyroid,ovary

SEQ ID NO: 476294 - DNA, 250 bp, Homo sapiens; identical to SEQ ID NO: 337602
  chr2:39944194-39944444
  hypo
  prostate vs. melanoma,bladder_and_urothelial

SEQ ID NO: 476295 - DNA, 395 bp, Homo sapiens; identical to SEQ ID NO: 345010
  chr2:43452443-43452838
  hypo
  prostate vs. pancreas_gallbladder,melanoma,upper_gi, colorectal,breast,liver_bileduct,uterine,non_cancer, myeloid_neoplasm

SEQ ID NO: 476296 - DNA, 25 bp, Homo sapiens
  chr2:44126077-44126102
  hypo
  prostate vs. bladder_and_urothelial,anorectal,sarcoma, lymphoid_neoplasm
cgaaactcgctgccccatacctacc

SEQ ID NO: 476297 - DNA, 84 bp, Homo sapiens; identical to SEQ ID NO: 376311
  chr2:44126131-44126215
  hypo
  prostate vs. bladder_and_urothelial,anorectal,sarcoma, lymphoid_neoplasm

SEQ ID NO: 476298 - DNA, 73 bp, Homo sapiens; identical to SEQ ID NO: 331292
  chr2:47656947-47657020
  hypo
  prostate vs. colorectal,upper_gi

SEQ ID NO: 476299 - DNA, 61 bp, Homo sapiens; identical to SEQ ID NO: 337621
  chr2:55391637-55391698
  hypo
  prostate vs. melanoma

SEQ ID NO: 476300 - DNA, 2 bp, Homo sapiens
  chr2:64836206-64836208
  hypo
  prostate vs. multiple_myeloma,pancreas_gallbladder, uterine,thyroid,myeloid_neoplasm,non_cancer,ovary
cg

SEQ ID NO: 476301 - DNA, 205 bp, Homo sapiens; identical to SEQ ID NO: 337640
  chr2:70165952-70166157
  hypo
  prostate vs. breast,sarcoma,cervical,head_and_neck,lung, bladder_and_urothelial,anorectal,lymphoid_neoplasm,upper_gi, ovary,colorectal,uterine

SEQ ID NO: 476302 - DNA, 236 bp, Homo sapiens; identical to SEQ ID NO: 453103
  chr2:74781700-74781936
  hypo
  prostate vs. colorectal,myeloid_neoplasm,thyroid,uterine, non_cancer,lymphoid_neoplasm,multiple_myeloma,upper_gi,renal, pancreas_gallbladder

SEQ ID NO: 476303 - DNA, 104 bp, Homo sapiens; identical to SEQ ID NO: 337664
  chr2:85776352-85776456
  hypo
  prostate vs. cervical,lymphoid_neoplasm,ovary,uterine, melanoma

SEQ ID NO: 476304 - DNA, 134 bp, Homo sapiens; identical to SEQ ID NO: 337696
  chr2:101696603-101696737
  hypo
  prostate vs. liver_bileduct,melanoma

SEQ ID NO: 476305 - DNA, 169 bp, Homo sapiens; identical to SEQ ID NO: 337783
  chr2:149525294-149525463
  hypo
  prostate vs. bladder_and_urothelial,head_and_neck

SEQ ID NO: 476306 - DNA, 120 bp, Homo sapiens; identical to SEQ ID NO: 337787
  chr2:152681239-152681359
  hypo
  prostate vs. melanoma

SEQ ID NO: 476307 - DNA, 9 bp, Homo sapiens
  chr2:160760627-160760636
  hypo
  prostate vs. lymphoid_neoplasm,anorectal, myeloid_neoplasm,cervical,non_cancer,upper_gi
cgggaatcg

SEQ ID NO: 476308 - DNA, 794 bp, Homo sapiens; identical to SEQ ID NO: 331546
  chr2:178257227-178258021
  hypo
  prostate vs. liver_bileduct,lung,bladder_and_urothelial, colorectal,uterine,renal,pancreas_gallbladder,melanoma,sarcoma, cervical,upper_gi,ovary,anorectal,non_cancer,thyroid, myeloid_neoplasm

SEQ ID NO: 476309 - DNA, 87 bp, Homo sapiens; identical to SEQ ID NO: 475625
  chr2:191044988-191045075
  hypo
  prostate vs. colorectal,pancreas_gallbladder,cervical, renal,ovary,multiple_myeloma,anorectal,uterine,non_cancer,lung, myeloid_neoplasm,bladder_and_urothelial,head_and_neck,upper_gi, sarcoma

SEQ ID NO: 476310 - DNA, 244 bp, Homo sapiens; identical to SEQ ID NO: 475626
  chr2:191045505-191045749
  hypo
  prostate vs. colorectal,pancreas_gallbladder,cervical, renal,ovary,multiple_myeloma,anorectal,uterine,non_cancer,lung, myeloid_neoplasm,bladder_and_urothelial,head_and_neck,upper_gi, sarcoma

SEQ ID NO: 476311 - DNA, 513 bp, Homo sapiens; identical to SEQ ID NO: 345059
  chr2:191045505-191046018
  hypo
  prostate vs. multiple_myeloma,cervical, pancreas_gallbladder,ovary,renal,uterine,non_cancer,anorectal, colorectal,myeloid_neoplasm,lung,upper_gi,head_and_neck, bladder_and_urothelial,sarcoma,melanoma

SEQ ID NO: 476312 - DNA, 86 bp, Homo sapiens; identical to SEQ ID NO: 337831
  chr2:198276053-198276139
  hypo
  prostate vs. lung,head_and_neck,breast,upper_gi, lymphoid_neoplasm,ovary,pancreas_gallbladder,renal,melanoma, multiple_myeloma,cervical,colorectal,uterine, bladder_and_urothelial,non_cancer,anorectal,sarcoma,
  CONT. FROM ABOVE: liver_bileduct,thyroid

SEQ ID NO: 476313 - DNA, 833 bp, Homo sapiens; identical to SEQ ID NO: 475630
  chr2:219845565-219846398
  hypo
  prostate vs. ovary,bladder_and_urothelial,thyroid

SEQ ID NO: 476314 - DNA, 444 bp, Homo sapiens; identical to SEQ ID NO: 475631
  chr2:219845954-219846398
  hypo
  prostate vs. anorectal,ovary,thyroid,myeloid_neoplasm, non_cancer,uterine,multiple_myeloma

SEQ ID NO: 476315 - DNA, 131 bp, Homo sapiens; identical to SEQ ID NO: 337890
  chr2:231676894-231677025
  hypo
  prostate vs. colorectal,melanoma,sarcoma, multiple_myeloma,renal,liver_bileduct,non_cancer

SEQ ID NO: 476316 - DNA, 105 bp, Homo sapiens; identical to SEQ ID NO: 464464
  chr2:232479181-232479286
  hypo
  prostate vs. upper_gi,myeloid_neoplasm,thyroid, pancreas_gallbladder,cervical,breast,anorectal

SEQ ID NO: 476317 - DNA, 227 bp, Homo sapiens; identical to SEQ ID NO: 349701
  chr2:232479454-232479681
  hypo
  prostate vs. upper_gi,myeloid_neoplasm,thyroid, pancreas_gallbladder,cervical,breast,anorectal

SEQ ID NO: 476318 - DNA, 147 bp, Homo sapiens; identical to SEQ ID NO: 353252
  chr2:239079151-239079298
  hypo
  prostate vs. cervical,breast,bladder_and_urothelial

SEQ ID NO: 476319 - DNA, 811 bp, Homo sapiens; identical to SEQ ID NO: 337948
  chr2:239973912-239974723
  hypo
  prostate vs. pancreas_gallbladder,bladder_and_urothelial, liver_bileduct,head_and_neck,renal,lymphoid_neoplasm,upper_gi, cervical,melanoma,sarcoma,lung,uterine

SEQ ID NO: 476320 - DNA, 134 bp, Homo sapiens
  chr2:242190662-242190796
  hypo
  prostate vs. liver_bileduct,upper_gi,lung,head_and_neck, breast,colorectal
cgtgtcaggcctaaacaaacgctacagttaaccaaaaccaaaacaaaaccgtaaaagcaagtttatggtgtatgtgtggttcaagtagtgcgcaaaaaggtcactttgtgcctacagactctcgtcgctgtcac

SEQ ID NO: 476321 - DNA, 82 bp, Homo sapiens; identical to SEQ ID NO: 331676
  chr2:242269474-242269556
  hypo
  prostate vs. colorectal,lymphoid_neoplasm

SEQ ID NO: 476322 - DNA, 44 bp, Homo sapiens
  chr2:242602207-242602251
  hypo
  prostate vs. breast
cgggccgggcgcggtggctcacgcctataatcccaacttcaaaa

SEQ ID NO: 476323 - DNA, 39 bp, Homo sapiens; identical to SEQ ID NO: 363188
  chr2:242602349-242602388
  hypo
  prostate vs. breast

SEQ ID NO: 476324 - DNA, 131 bp, Homo sapiens; identical to SEQ ID NO: 456838
  chr2:242617764-242617895
  hypo
  prostate vs. sarcoma,thyroid,multiple_myeloma,colorectal, myeloid_neoplasm,renal,ovary,liver_bileduct,lung

SEQ ID NO: 476325 - DNA, 531 bp, Homo sapiens; identical to SEQ ID NO: 347967
  chr2:242617924-242618455
  hypo
  prostate vs. sarcoma,thyroid,multiple_myeloma,colorectal, myeloid_neoplasm,renal,ovary,liver_bileduct,lung

SEQ ID NO: 476326 - DNA, 102 bp, Homo sapiens; identical to SEQ ID NO: 465477
  chr20:400915-401017
  hypo
  prostate vs. sarcoma,melanoma

SEQ ID NO: 476327 - DNA, 414 bp, Homo sapiens; identical to SEQ ID NO: 347652
  chr20:4804008-4804422
  hypo
  prostate vs. melanoma,non_cancer,myeloid_neoplasm

SEQ ID NO: 476328 - DNA, 4 bp, Homo sapiens
  chr20:17972167-17972171
  hypo
  prostate vs. upper_gi,pancreas_gallbladder,breast, head_and_neck,lung,liver_bileduct,bladder_and_urothelial
cgac

SEQ ID NO: 476329 - DNA, 4 bp, Homo sapiens
  chr20:18489643-18489647
  hypo
  prostate vs. multiple_myeloma,sarcoma,thyroid, myeloid_neoplasm,non_cancer,anorectal
cgtg

SEQ ID NO: 476330 - DNA, 585 bp, Homo sapiens; identical to SEQ ID NO: 455929
  chr20:30193272-30193857
  hypo
  prostate vs. lung

SEQ ID NO: 476331 - DNA, 189 bp, Homo sapiens; identical to SEQ ID NO: 345629
  chr20:30193992-30194181
  hypo
  prostate vs. lung

SEQ ID NO: 476332 - DNA, 35 bp, Homo sapiens; identical to SEQ ID NO: 344204
  chr20:30996055-30996090
  hypo
  prostate vs. renal,melanoma,sarcoma,uterine,ovary, lymphoid_neoplasm,non_cancer

SEQ ID NO: 476333 - DNA, 32 bp, Homo sapiens; identical to SEQ ID NO: 465483
  chr20:32677630-32677662
  hypo
  prostate vs. colorectal,liver_bileduct,cervical

SEQ ID NO: 476334 - DNA, 205 bp, Homo sapiens; identical to SEQ ID NO: 368318
  chr20:32677691-32677896
  hypo
  prostate vs. colorectal,liver_bileduct,cervical

SEQ ID NO: 476335 - DNA, 173 bp, Homo sapiens; identical to SEQ ID NO: 455106
  chr20:42088459-42088632
  hypo
  prostate vs. lymphoid_neoplasm,sarcoma,multiple_myeloma, ovary,renal,myeloid_neoplasm,pancreas_gallbladder,non_cancer, colorectal,uterine

SEQ ID NO: 476336 - DNA, 7 bp, Homo sapiens
  chr20:42088765-42088772
  hypo
  prostate vs. lymphoid_neoplasm,sarcoma,multiple_myeloma, ovary,renal,myeloid_neoplasm,pancreas_gallbladder,non_cancer, colorectal,uterine
atgaagc

SEQ ID NO: 476337 - DNA, 129 bp, Homo sapiens; identical to SEQ ID NO: 344268
  chr20:47688836-47688965
  hypo
  prostate vs. breast,lung,pancreas_gallbladder, liver_bileduct,head_and_neck,bladder_and_urothelial, lymphoid_neoplasm,renal

SEQ ID NO: 476338 - DNA, 51 bp, Homo sapiens; identical to SEQ ID NO: 344269
  chr20:47713222-47713273
  hypo
  prostate vs. liver_bileduct,cervical,breast

SEQ ID NO: 476339 - DNA, 246 bp, Homo sapiens; identical to SEQ ID NO: 456862
  chr20:48524519-48524765
  hypo
  prostate vs. melanoma,sarcoma

SEQ ID NO: 476340 - DNA, 373 bp, Homo sapiens; identical to SEQ ID NO: 356300
  chr20:48524818-48525191
  hypo
  prostate vs. melanoma,sarcoma

SEQ ID NO: 476341 - DNA, 174 bp, Homo sapiens; identical to SEQ ID NO: 344302
  chr20:52374073-52374247
  hypo
  prostate vs. liver_bileduct

SEQ ID NO: 476342 - DNA, 29 bp, Homo sapiens
  chr20:62221291-62221320
  hypo
  prostate vs. renal,uterine,colorectal,melanoma, multiple_myeloma
cgtgatttgttttggcgattcctctcttt

SEQ ID NO: 476343 - DNA, 613 bp, Homo sapiens; identical to SEQ ID NO: 368484
  chr20:62221442-62222055
  hypo
  prostate vs. renal,uterine,colorectal,melanoma, multiple_myeloma

SEQ ID NO: 476344 - DNA, 357 bp, Homo sapiens; identical to SEQ ID NO: 344411
  chr20:62252093-62252450
  hypo
  prostate vs. renal

SEQ ID NO: 476345 - DNA, 264 bp, Homo sapiens; identical to SEQ ID NO: 352532
  chr20:62461639-62461903
  hypo
  prostate vs. breast,thyroid,myeloid_neoplasm,non_cancer

SEQ ID NO: 476346 - DNA, 507 bp, Homo sapiens; identical to SEQ ID NO: 344425
  chr20:62550652-62551159
  hypo
  prostate vs. breast,liver_bileduct,upper_gi,lung, colorectal,uterine,cervical

SEQ ID NO: 476347 - DNA, 585 bp, Homo sapiens; identical to SEQ ID NO: 383134
  chr20:62551409-62551994
  hypo
  prostate vs. liver_bileduct

SEQ ID NO: 476348 - DNA, 746 bp, Homo sapiens
  chr20:62562220-62562966
  hypo
  prostate vs. renal,melanoma,bladder_and_urothelial, liver_bileduct
cggcctcctcacgtgctgctactgctgctgctgtctgtgctgctgcttcaactgctgctgcgggaagtgtaagcccaaggcgcctgaaggcgaggagacggagttctacgtgtcccccgaggatctggaggcacagctgcagtctgacgagaggggtgagtgcccgccccagggcccgtgtgtgtgtgtggggcagagccagaatgggccctgaatggtgtcaacctgtcttgtcaaacaggagggcactgacactgtgccgcgagtgtttgtggtggcagctgggactgttgaggtgtgaacgtggaccctgaggtaaagcaggcgcatagagctgtccccgccgtgacctgcggtagccgtagatcccagggactgcgaggcggggcagggcggcaggcagttggggcggggctgagggccgagggctggcggtgacccaaggcgacggaggaaagccgtgtggggtggaggtcagcgagtagcctctcccggtggagagtttgtccaggtgcccgaaagtcgctccacaggaccagcgttgggtgcgcgccaggctgtggccctcgtgcagtgccctgtgtgcttgcttttcagaggccacagacacgccgatcgtcatacagccggcatccgccaccgagaccacccagctcacagccgactcccaccccagctaccacactgacgggttcaactaaatccaggaggagctgtggtcagaggaggagccggcgcctggccac

SEQ ID NO: 476349 - DNA, 817 bp, Homo sapiens
  chr20:62562561-62563378
  hypo
  prostate vs. renal,melanoma,liver_bileduct, bladder_and_urothelial
cgccgtgacctgcggtagccgtagatcccagggactgcgaggcggggcagggcggcaggcagttggggcggggctgagggccgagggctggcggtgacccaaggcgacggaggaaagccgtgtggggtggaggtcagcgagtagcctctcccggtggagagtttgtccaggtgcccgaaagtcgctccacaggaccagcgttgggtgcgcgccaggctgtggccctcgtgcagtgccctgtgtgcttgcttttcagaggccacagacacgccgatcgtcatacagccggcatccgccaccgagaccacccagctcacagccgactcccaccccagctaccacactgacgggttcaactaaatccaggaggagctgtggtcagaggaggagccggcgcctggccacgccaaccttagaatcatgaactgtagtcacagagatgggaaggcagcctcctgcctgccctggccttgctggggcccctcctgcctccacgcccacccagcgtcgacccttgacccacgaagtgcgtagcatgcagtatttaaagcagtgtagctacggtcttctgtttttttcccttttttaatagcatgtatggggttctgttccatgtctgtgttgtggacattccgcggcatgaccgcgtgaactgcacggtggagctgcctcagggctgtcggtcaggttggtccagtgaggggtgactgcagccggtcaggtgggcgaggagaaggggggctgcccctttcctacctgtgcttgaggggccggaggcaggtgctgcctggcagagctgtgttaccgtcttggcctc

SEQ ID NO: 476350 - DNA, 161 bp, Homo sapiens; identical to SEQ ID NO: 344445
  chr21:30357072-30357233
  hypo
  prostate vs. upper_gi,lung

SEQ ID NO: 476351 - DNA, 42 bp, Homo sapiens; identical to SEQ ID NO: 349055
  chr21:37775172-37775214
  hypo
  prostate vs. melanoma,cervical,anorectal,renal, lymphoid_neoplasm

SEQ ID NO: 476352 - DNA, 34 bp, Homo sapiens; identical to SEQ ID NO: 459662
  chr21:44847478-44847512
  hypo
  prostate vs. breast,renal,cervical

SEQ ID NO: 476353 - DNA, 643 bp, Homo sapiens; identical to SEQ ID NO: 473237
  chr21:45400182-45400825
  hypo
  prostate vs. renal,bladder_and_urothelial,uterine, anorectal,upper_gi,sarcoma,myeloid_neoplasm,cervical,non_cancer, liver_bileduct,multiple_myeloma,breast,melanoma

SEQ ID NO: 476354 - DNA, 278 bp, Homo sapiens; identical to SEQ ID NO: 349067
  chr21:45400854-45401132
  hypo
  prostate vs. renal,bladder_and_urothelial,uterine, anorectal,upper_gi,sarcoma,myeloid_neoplasm,cervical,non_cancer, liver_bileduct,multiple_myeloma,breast,melanoma

SEQ ID NO: 476355 - DNA, 153 bp, Homo sapiens; identical to SEQ ID NO: 383292
  chr21:46645775-46645928
  hypo
  prostate vs. renal

SEQ ID NO: 476356 - DNA, 60 bp, Homo sapiens; identical to SEQ ID NO: 456906
  chr21:46934012-46934072
  hypo
  prostate vs. melanoma

SEQ ID NO: 476357 - DNA, 106 bp, Homo sapiens; identical to SEQ ID NO: 344655
  chr22:18084157-18084263
  hypo
  prostate vs. pancreas_gallbladder,liver_bileduct, head_and_neck,ovary,upper_gi,lung,colorectal,lymphoid_neoplasm, breast,multiple_myeloma,uterine,melanoma,cervical,anorectal, non_cancer,thyroid

SEQ ID NO: 476358 - DNA, 353 bp, Homo sapiens; identical to SEQ ID NO: 344668
  chr22:19899693-19900046
  hypo
  prostate vs. liver_bileduct

SEQ ID NO: 476359 - DNA, 91 bp, Homo sapiens; identical to SEQ ID NO: 455177
  chr22:19924393-19924484
  hypo
  prostate vs. lymphoid_neoplasm,head_and_neck,renal, melanoma,cervical,breast,ovary,sarcoma,multiple_myeloma

SEQ ID NO: 476360 - DNA, 139 bp, Homo sapiens; identical to SEQ ID NO: 344715
  chr22:29686357-29686496
  hypo
  prostate vs. liver_bileduct,multiple_myeloma,melanoma, breast,lymphoid_neoplasm,uterine,ovary

SEQ ID NO: 476361 - DNA, 120 bp, Homo sapiens; identical to SEQ ID NO: 344717
  chr22:29758124-29758244
  hypo
  prostate vs. bladder_and_urothelial,breast,upper_gi, cervical,colorectal,pancreas_gallbladder,anorectal, head_and_neck,melanoma,liver_bileduct,lung

SEQ ID NO: 476362 - DNA, 132 bp, Homo sapiens; identical to SEQ ID NO: 344744
  chr22:32804860-32804992
  hypo
  prostate vs. lung,breast,pancreas_gallbladder

SEQ ID NO: 476363 - DNA, 69 bp, Homo sapiens; identical to SEQ ID NO: 344787
  chr22:41658279-41658348
  hypo
  prostate vs. colorectal,bladder_and_urothelial,upper_gi, renal,sarcoma,multiple_myeloma,head_and_neck,lymphoid_neoplasm, lung,cervical,ovary,liver_bileduct,pancreas_gallbladder, non_cancer,uterine

SEQ ID NO: 476364 - DNA, 141 bp, Homo sapiens; identical to SEQ ID NO: 344800
  chr22:43351254-43351395
  hypo
  prostate vs. colorectal,lymphoid_neoplasm

SEQ ID NO: 476365 - DNA, 25 bp, Homo sapiens
  chr22:45120602-45120627
  hypo
  prostate vs. bladder_and_urothelial
cgagcctctcttgcctcccctgtaa

SEQ ID NO: 476366 - DNA, 78 bp, Homo sapiens; identical to SEQ ID NO: 356562
  chr22:45120758-45120836
  hypo
  prostate vs. bladder_and_urothelial

SEQ ID NO: 476367 - DNA, 28 bp, Homo sapiens
  chr22:45603889-45603917
  hypo
  prostate vs. renal,melanoma
cgatcacacggctgttcggggcagcacc

SEQ ID NO: 476368 - DNA, 239 bp, Homo sapiens; identical to SEQ ID NO: 456942
  chr22:45603946-45604185
  hypo
  prostate vs. renal,melanoma

SEQ ID NO: 476369 - DNA, 55 bp, Homo sapiens; identical to SEQ ID NO: 356566
  chr22:45604387-45604442
  hypo
  prostate vs. renal,melanoma

SEQ ID NO: 476370 - DNA, 72 bp, Homo sapiens; identical to SEQ ID NO: 344844
  chr22:47465521-47465593
  hypo
  prostate vs. lung,head_and_neck,colorectal,renal, upper_gi,pancreas_gallbladder,breast

SEQ ID NO: 476371 - DNA, 119 bp, Homo sapiens
  chr22:47465782-47465901
  hypo
  prostate vs. lung,upper_gi,breast,pancreas_gallbladder, melanoma,head_and_neck,ovary
cggagctgacttgacggttccagcgctgtcccctgttgtttggttggagcagagctgacctgacggtcccagcgctgtcccctgtttggttggagcggagctgacctgacggtcccagc

SEQ ID NO: 476372 - DNA, 89 bp, Homo sapiens; identical to SEQ ID NO: 344846
  chr22:47465973-47466062
  hypo
  prostate vs. lung

SEQ ID NO: 476373 - DNA, 226 bp, Homo sapiens; identical to SEQ ID NO: 456951
  chr22:50191356-50191582
  hypo
  prostate vs. upper_gi,head_and_neck,melanoma, bladder_and_urothelial,liver_bileduct,cervical,lung, pancreas_gallbladder,colorectal,anorectal,renal, lymphoid_neoplasm,myeloid_neoplasm,thyroid,ovary,uterine,
  CONT. FROM ABOVE: non_cancer

SEQ ID NO: 476374 - DNA, 81 bp, Homo sapiens; identical to SEQ ID NO: 346293
  chr22:50191626-50191707
  hypo
  prostate vs. upper_gi,head_and_neck,melanoma, bladder_and_urothelial,liver_bileduct,cervical,lung, pancreas_gallbladder,colorectal,anorectal,renal, lymphoid_neoplasm,myeloid_neoplasm,thyroid,ovary,uterine,
  CONT. FROM ABOVE: non_cancer

SEQ ID NO: 476375 - DNA, 114 bp, Homo sapiens; identical to SEQ ID NO: 383615
  chr22:50192076-50192190
  hypo
  prostate vs. breast

SEQ ID NO: 476376 - DNA, 232 bp, Homo sapiens; identical to SEQ ID NO: 475668
  chr3:5018754-5018986
  hypo
  prostate vs. breast,melanoma,bladder_and_urothelial

SEQ ID NO: 476377 - DNA, 143 bp, Homo sapiens; identical to SEQ ID NO: 345077
  chr3:5019132-5019275
  hypo
  prostate vs. breast,melanoma,bladder_and_urothelial

SEQ ID NO: 476378 - DNA, 58 bp, Homo sapiens; identical to SEQ ID NO: 338023
  chr3:10011425-10011483
  hypo
  prostate vs. liver_bileduct

SEQ ID NO: 476379 - DNA, 166 bp, Homo sapiens; identical to SEQ ID NO: 455197
  chr3:11581157-11581323
  hypo

SEQ ID NO: 476380 - DNA, 78 bp, Homo sapiens; identical to SEQ ID NO: 345081
  chr3:16555426-16555504
  hypo
  prostate vs. sarcoma,lymphoid_neoplasm,anorectal,thyroid, myeloid_neoplasm

SEQ ID NO: 476381 - DNA, 108 bp, Homo sapiens; identical to SEQ ID NO: 454364
  chr3:16925425-16925533
  hypo
  prostate vs. myeloid_neoplasm,thyroid,non_cancer

SEQ ID NO: 476382 - DNA, 74 bp, Homo sapiens; identical to SEQ ID NO: 454365
  chr3:16925583-16925657
  hypo
  prostate vs. myeloid_neoplasm,thyroid,non_cancer

SEQ ID NO: 476383 - DNA, 231 bp, Homo sapiens; identical to SEQ ID NO: 454366
  chr3:16925705-16925936
  hypo
  prostate vs. myeloid_neoplasm,thyroid,non_cancer

SEQ ID NO: 476384 - DNA, 256 bp, Homo sapiens; identical to SEQ ID NO: 454367
  chr3:16925965-16926221
  hypo
  prostate vs. myeloid_neoplasm,thyroid,non_cancer

SEQ ID NO: 476385 - DNA, 340 bp, Homo sapiens; identical to SEQ ID NO: 349744
  chr3:16926663-16927003
  hypo
  prostate vs. liver_bileduct,pancreas_gallbladder

SEQ ID NO: 476386 - DNA, 125 bp, Homo sapiens
  chr3:33689123-33689248
  hypo
  prostate vs. upper_gi,breast,lung,liver_bileduct, pancreas_gallbladder
cgagtgcagttgtgcttcaataaaattttatatacaaaaacaggagggcagatggttttgatccgcaagcaacagtttgccaatctctgctctaggctaactactaaaagaagagtaagtaggcc

SEQ ID NO: 476387 - DNA, 175 bp, Homo sapiens
  chr3:33818922-33819097
  hypo
  prostate vs. lung,pancreas_gallbladder,colorectal,renal, lymphoid_neoplasm,ovary,melanoma,head_and_neck,cervical,sarcoma
cggaggttgcagtgagccaagatcacgccactgcactccggccaaagtgcgactctgtctcaaaagaaaaaacaagtaataactaatatttattgagttatttaatgttccaggtactattataaacactttatgtaaacaattatgtaactttttttttttgagatggagtctc

SEQ ID NO: 476388 - DNA, 99 bp, Homo sapiens; identical to SEQ ID NO: 474972
  chr3:42222621-42222720
  hypo
  prostate vs. sarcoma

SEQ ID NO: 476389 - DNA, 2 bp, Homo sapiens
  chr3:42222759-42222761
  hypo
  prostate vs. sarcoma
gc

SEQ ID NO: 476390 - DNA, 114 bp, Homo sapiens; identical to SEQ ID NO: 338089
  chr3:45750569-45750683
  hypo
  prostate vs. lung,head_and_neck,liver_bileduct, pancreas_gallbladder,melanoma,breast

SEQ ID NO: 476391 - DNA, 149 bp, Homo sapiens; identical to SEQ ID NO: 456965
  chr3:56718095-56718244
  hypo
  prostate vs. head_and_neck,renal,lymphoid_neoplasm, uterine,melanoma,sarcoma,thyroid,colorectal,non_cancer,ovary, cervical,myeloid_neoplasm,pancreas_gallbladder,multiple_myeloma

SEQ ID NO: 476392 - DNA, 170 bp, Homo sapiens; identical to SEQ ID NO: 345801
  chr3:56718281-56718451
  hypo
  prostate vs. head_and_neck,renal,lymphoid_neoplasm, uterine,melanoma,sarcoma,thyroid,colorectal,non_cancer,ovary, cervical,myeloid_neoplasm,pancreas_gallbladder,multiple_myeloma

SEQ ID NO: 476393 - DNA, 261 bp, Homo sapiens; identical to SEQ ID NO: 338120
  chr3:57679351-57679612
  hypo
  prostate vs. lymphoid_neoplasm

SEQ ID NO: 476394 - DNA, 144 bp, Homo sapiens
  chr3:58136696-58136840
  hypo
  prostate vs. upper_gi
cggagctgtcgactccgccttcttggctttagttaacaggttcttcttgtgtagtcacatcaacgtcgggtcacatgggaatgtggtaaagcctcattactgtagagttcagacatgatcacttaaaaagagctttattgggcc

SEQ ID NO: 476395 - DNA, 264 bp, Homo sapiens; identical to SEQ ID NO: 338134
  chr3:71036199-71036463
  hypo
  prostate vs. liver_bileduct,lung,head_and_neck,anorectal, pancreas_gallbladder,lymphoid_neoplasm,cervical

SEQ ID NO: 476396 - DNA, 346 bp, Homo sapiens; identical to SEQ ID NO: 475694
  chr3:115377294-115377640
  hypo
  prostate vs. multiple_myeloma,uterine

SEQ ID NO: 476397 - DNA, 27 bp, Homo sapiens
  chr3:115377953-115377980
  hypo
  prostate vs. multiple_myeloma,uterine
cagggccaggggagtggaagagcggcc

SEQ ID NO: 476398 - DNA, 30 bp, Homo sapiens; identical to SEQ ID NO: 460367
  chr3:123667353-123667383
  hypo
  prostate vs. upper_gi,breast,liver_bileduct, lymphoid_neoplasm,lung,pancreas_gallbladder,head_and_neck, uterine,renal,melanoma,bladder_and_urothelial,sarcoma,ovary, anorectal

SEQ ID NO: 476399 - DNA, 438 bp, Homo sapiens; identical to SEQ ID NO: 345099
  chr3:124773932-124774370
  hypo
  prostate vs. non_cancer,anorectal,myeloid_neoplasm, thyroid,cervical,upper_gi,liver_bileduct,pancreas_gallbladder, renal,uterine,sarcoma,multiple_myeloma,bladder_and_urothelial

SEQ ID NO: 476400 - DNA, 174 bp, Homo sapiens; identical to SEQ ID NO: 338175
  chr3:127326124-127326298
  hypo
  prostate vs. bladder_and_urothelial,upper_gi,colorectal, sarcoma,renal,ovary,melanoma,uterine,lymphoid_neoplasm,cervical, non_cancer

SEQ ID NO: 476401 - DNA, 216 bp, Homo sapiens; identical to SEQ ID NO: 338193
  chr3:130424529-130424745
  hypo

SEQ ID NO: 476402 - DNA, 124 bp, Homo sapiens; identical to SEQ ID NO: 455226
  chr3:141174173-141174297
  hypo
  prostate vs. melanoma,thyroid

SEQ ID NO: 476403 - DNA, 8 bp, Homo sapiens
  chr3:141174671-141174679
  hypo
  prostate vs. melanoma,thyroid
gtttcagc

SEQ ID NO: 476404 - DNA, 68 bp, Homo sapiens; identical to SEQ ID NO: 338217
  chr3:142103585-142103653
  hypo
  prostate vs. upper_gi,lung,liver_bileduct,colorectal, head_and_neck,bladder_and_urothelial,pancreas_gallbladder,ovary, lymphoid_neoplasm,melanoma,multiple_myeloma

SEQ ID NO: 476405 - DNA, 114 bp, Homo sapiens; identical to SEQ ID NO: 338256
  chr3:182656917-182657031
  hypo
  prostate vs. lymphoid_neoplasm,upper_gi,liver_bileduct, bladder_and_urothelial

SEQ ID NO: 476406 - DNA, 195 bp, Homo sapiens; identical to SEQ ID NO: 338266
  chr3:183703570-183703765
  hypo
  prostate vs. bladder_and_urothelial,colorectal, head_and_neck,lung

SEQ ID NO: 476407 - DNA, 107 bp, Homo sapiens; identical to SEQ ID NO: 338268
  chr3:183891953-183892060
  hypo
  prostate vs. breast

SEQ ID NO: 476408 - DNA, 46 bp, Homo sapiens; identical to SEQ ID NO: 454388
  chr3:187455297-187455343
  hypo
  prostate vs. renal,non_cancer,multiple_myeloma,thyroid, lymphoid_neoplasm,colorectal

SEQ ID NO: 476409 - DNA, 447 bp, Homo sapiens; identical to SEQ ID NO: 454389
  chr3:187456666-187457113
  hypo
  prostate vs. non_cancer,thyroid,renal,myeloid_neoplasm, multiple_myeloma

SEQ ID NO: 476410 - DNA, 134 bp, Homo sapiens; identical to SEQ ID NO: 338297
  chr3:193391768-193391902
  hypo
  prostate vs. lymphoid_neoplasm,renal,non_cancer, multiple_myeloma,colorectal,breast,sarcoma

SEQ ID NO: 476411 - DNA, 473 bp, Homo sapiens; identical to SEQ ID NO: 338325
  chr3:195750601-195751074
  hypo
  prostate vs. lymphoid_neoplasm,thyroid,melanoma

SEQ ID NO: 476412 - DNA, 493 bp, Homo sapiens; identical to SEQ ID NO: 338362
  chr4:1204224-1204717
  hypo
  prostate vs. lung,pancreas_gallbladder,head_and_neck, bladder_and_urothelial,breast,upper_gi,liver_bileduct

SEQ ID NO: 476413 - DNA, 130 bp, Homo sapiens
  chr4:1205845-1205975
  hypo
  prostate vs. liver_bileduct,bladder_and_urothelial, lymphoid_neoplasm,upper_gi,melanoma,pancreas_gallbladder, cervical
cgcccacaggacggacgacgacaagcgacacgaggcccagcgctgccccctcccgcctcctgacagcccggaccagtctctgcagtgccagggccaccacacagatgcctcctccacacactctggtccg

SEQ ID NO: 476414 - DNA, 269 bp, Homo sapiens; identical to SEQ ID NO: 353446
  chr4:1206025-1206294
  hypo
  prostate vs. liver_bileduct,bladder_and_urothelial, lymphoid_neoplasm,upper_gi,melanoma,pancreas_gallbladder, cervical

SEQ ID NO: 476415 - DNA, 212 bp, Homo sapiens; identical to SEQ ID NO: 338391
  chr4:1902464-1902676
  hypo
  prostate vs. breast

SEQ ID NO: 476416 - DNA, 74 bp, Homo sapiens
  chr4:2638078-2638152
  hypo
  prostate vs. upper_gi,liver_bileduct,melanoma,ovary, cervical
cgtgccctgccaggaagaatattttaatagcctcttcaaatcctgatagatcttctctgagagtacaccaacgc

SEQ ID NO: 476417 - DNA, 211 bp, Homo sapiens; identical to SEQ ID NO: 338408
  chr4:2639936-2640147
  hypo
  prostate vs. melanoma,renal

SEQ ID NO: 476418 - DNA, 124 bp, Homo sapiens
  chr4:26855445-26855569
  hypo
  prostate vs. renal,lymphoid_neoplasm,sarcoma
cgcgcctggccaagaaacaacttttaaaatctgatcttctttctttcgtatttacaataatgctctgggaatgtgctcatccgtaattcaaacatccacatttccagactttctgttttccttc

SEQ ID NO: 476419 - DNA, 43 bp, Homo sapiens; identical to SEQ ID NO: 338475
  chr4:40261237-40261280
  hypo
  prostate vs. breast,colorectal,lung

SEQ ID NO: 476420 - DNA, 145 bp, Homo sapiens; identical to SEQ ID NO: 338485
  chr4:48572780-48572925
  hypo
  prostate vs. head_and_neck,lymphoid_neoplasm,melanoma, breast,lung,multiple_myeloma,uterine,colorectal,ovary,thyroid, bladder_and_urothelial,anorectal,non_cancer,upper_gi, myeloid_neoplasm

SEQ ID NO: 476421 - DNA, 87 bp, Homo sapiens; identical to SEQ ID NO: 338491
  chr4:57093728-57093815
  hypo
  prostate vs. head_and_neck

SEQ ID NO: 476422 - DNA, 85 bp, Homo sapiens; identical to SEQ ID NO: 338498
  chr4:57896316-57896401
  hypo
  prostate vs. pancreas_gallbladder,lung

SEQ ID NO: 476423 - DNA, 28 bp, Homo sapiens
  chr4:106067046-106067074
  hypo
  prostate vs. cervical
cggggcggggagaaacagaactcggtca

SEQ ID NO: 476424 - DNA, 269 bp, Homo sapiens; identical to SEQ ID NO: 349958
  chr4:106067220-106067489
  hypo
  prostate vs. cervical

SEQ ID NO: 476425 - DNA, 305 bp, Homo sapiens; identical to SEQ ID NO: 332186
  chr4:120549993-120550298
  hypo
  prostate vs. lung

SEQ ID NO: 476426 - DNA, 189 bp, Homo sapiens; identical to SEQ ID NO: 338542
  chr4:141007383-141007572
  hypo
  prostate vs. head_and_neck,pancreas_gallbladder

SEQ ID NO: 476427 - DNA, 111 bp, Homo sapiens; identical to SEQ ID NO: 338557
  chr4:154421947-154422058
  hypo
  prostate vs. liver_bileduct,melanoma,sarcoma,uterine, breast,renal,lymphoid_neoplasm,ovary,cervical,myeloid_neoplasm, non_cancer,lung,pancreas_gallbladder,thyroid

SEQ ID NO: 476428 - DNA, 171 bp, Homo sapiens; identical to SEQ ID NO: 456015
  chr5:10564301-10564472
  hypo
  prostate vs. anorectal,myeloid_neoplasm,thyroid, non_cancer,lymphoid_neoplasm,sarcoma

SEQ ID NO: 476429 - DNA, 112 bp, Homo sapiens; identical to SEQ ID NO: 338709
  chr5:14681608-14681720
  hypo
  prostate vs. liver_bileduct,breast

SEQ ID NO: 476430 - DNA, 215 bp, Homo sapiens; identical to SEQ ID NO: 332355
  chr5:43603571-43603786
  hypo
  prostate vs. melanoma,bladder_and_urothelial,sarcoma, multiple_myeloma

SEQ ID NO: 476431 - DNA, 62 bp, Homo sapiens; identical to SEQ ID NO: 338743
  chr5:74753672-74753734
  hypo
  prostate vs. lymphoid_neoplasm

SEQ ID NO: 476432 - DNA, 35 bp, Homo sapiens; identical to SEQ ID NO: 338751
  chr5:77425063-77425098
  hypo
  prostate vs. upper_gi,melanoma,bladder_and_urothelial, cervical,lymphoid_neoplasm,breast,pancreas_gallbladder

SEQ ID NO: 476433 - DNA, 26 bp, Homo sapiens
  chr5:94982109-94982135
  hypo
  prostate vs. melanoma,renal,multiple_myeloma
cgtgaaccaccgcgcccggccttaac

SEQ ID NO: 476434 - DNA, 72 bp, Homo sapiens; identical to SEQ ID NO: 457026
  chr5:96114516-96114588
  hypo
  prostate vs. lung,pancreas_gallbladder,upper_gi,ovary, colorectal,liver_bileduct,melanoma

SEQ ID NO: 476435 - DNA, 53 bp, Homo sapiens; identical to SEQ ID NO: 353629
  chr5:96114632-96114685
  hypo
  prostate vs. lung,pancreas_gallbladder,upper_gi,ovary, colorectal,liver_bileduct,melanoma

SEQ ID NO: 476436 - DNA, 246 bp, Homo sapiens; identical to SEQ ID NO: 338782
  chr5:126213748-126213994
  hypo
  prostate vs. upper_gi

SEQ ID NO: 476437 - DNA, 241 bp, Homo sapiens; identical to SEQ ID NO: 358234
  chr5:131831522-131831763
  hypo
  prostate vs. lung,upper_gi,breast,pancreas_gallbladder

SEQ ID NO: 476438 - DNA, 805 bp, Homo sapiens; identical to SEQ ID NO: 332483
  chr5:132386973-132387778
  hypo
  prostate vs. upper_gi,lymphoid_neoplasm,head_and_neck, pancreas_gallbladder,bladder_and_urothelial,colorectal,uterine, renal,melanoma,sarcoma,multiple_myeloma,cervical,lung, non_cancer,anorectal

SEQ ID NO: 476439 - DNA, 873 bp, Homo sapiens; identical to SEQ ID NO: 332486
  chr5:133862738-133863611
  hypo
  prostate vs. lung,pancreas_gallbladder,head_and_neck, liver_bileduct,breast,ovary,upper_gi,uterine

SEQ ID NO: 476440 - DNA, 469 bp, Homo sapiens; identical to SEQ ID NO: 332510
  chr5:139088846-139089315
  hypo
  prostate vs. liver_bileduct,pancreas_gallbladder, upper_gi,ovary

SEQ ID NO: 476441 - DNA, 625 bp, Homo sapiens; identical to SEQ ID NO: 456042
  chr5:142781875-142782500
  hypo
  prostate vs. multiple_myeloma,anorectal

SEQ ID NO: 476442 - DNA, 78 bp, Homo sapiens; identical to SEQ ID NO: 456043
  chr5:142782625-142782703
  hypo
  prostate vs. multiple_myeloma,anorectal

SEQ ID NO: 476443 - DNA, 201 bp, Homo sapiens; identical to SEQ ID NO: 338816
  chr5:145887336-145887537
  hypo
  prostate vs. liver_bileduct

SEQ ID NO: 476444 - DNA, 66 bp, Homo sapiens; identical to SEQ ID NO: 338822
  chr5:149375694-149375760
  hypo
  prostate vs. renal,colorectal

SEQ ID NO: 476445 - DNA, 250 bp, Homo sapiens; identical to SEQ ID NO: 338852
  chr5:171471000-171471250
  hypo
  prostate vs. sarcoma

SEQ ID NO: 476446 - DNA, 3 bp, Homo sapiens
  chr5:178987428-178987431
  hypo
cgt

SEQ ID NO: 476447 - DNA, 727 bp, Homo sapiens; identical to SEQ ID NO: 332613
  chr5:179245848-179246575
  hypo
  prostate vs. lung,breast,upper_gi,pancreas_gallbladder, liver_bileduct,colorectal,bladder_and_urothelial,ovary

SEQ ID NO: 476448 - DNA, 108 bp, Homo sapiens; identical to SEQ ID NO: 338914
  chr5:179708846-179708954
  hypo
  prostate vs. head_and_neck,liver_bileduct

SEQ ID NO: 476449 - DNA, 127 bp, Homo sapiens; identical to SEQ ID NO: 350235
  chr5:180018679-180018806
  hypo
  prostate vs. bladder_and_urothelial,cervical

SEQ ID NO: 476450 - DNA, 394 bp, Homo sapiens; identical to SEQ ID NO: 469266
  chr6:710660-711054
  hypo
  prostate vs. bladder_and_urothelial,multiple_myeloma, cervical

SEQ ID NO: 476451 - DNA, 699 bp, Homo sapiens; identical to SEQ ID NO: 332640
  chr6:3750702-3751401
  hypo
  prostate vs. pancreas_gallbladder,ovary,lung,sarcoma, renal,melanoma

SEQ ID NO: 476452 - DNA, 126 bp, Homo sapiens; identical to SEQ ID NO: 338953
  chr6:4061573-4061699
  hypo
  prostate vs. head_and_neck,upper_gi,colorectal, pancreas_gallbladder,breast

SEQ ID NO: 476453 - DNA, 123 bp, Homo sapiens; identical to SEQ ID NO: 338962
  chr6:5108225-5108348
  hypo
  prostate vs. head_and_neck,breast,anorectal,upper_gi

SEQ ID NO: 476454 - DNA, 249 bp, Homo sapiens; identical to SEQ ID NO: 338985
  chr6:12338243-12338492
  hypo
  prostate vs. head_and_neck,anorectal,uterine,cervical, lung

SEQ ID NO: 476455 - DNA, 120 bp, Homo sapiens; identical to SEQ ID NO: 338991
  chr6:16322061-16322181
  hypo
  prostate vs. breast,liver_bileduct,renal,melanoma, head_and_neck,lung,upper_gi,colorectal,ovary,anorectal, lymphoid_neoplasm,bladder_and_urothelial,pancreas_gallbladder

SEQ ID NO: 476456 - DNA, 94 bp, Homo sapiens; identical to SEQ ID NO: 339001
  chr6:24662806-24662900
  hypo
  prostate vs. head_and_neck,pancreas_gallbladder

SEQ ID NO: 476457 - DNA, 104 bp, Homo sapiens; identical to SEQ ID NO: 339007
  chr6:27428748-27428852
  hypo
  prostate vs. breast

SEQ ID NO: 476458 - DNA, 126 bp, Homo sapiens; identical to SEQ ID NO: 339009
  chr6:28327754-28327880
  hypo
  prostate vs. lung

SEQ ID NO: 476459 - DNA, 22 bp, Homo sapiens
  chr6:34618577-34618599
  hypo
  prostate vs. pancreas_gallbladder,colorectal
agctattgggacaactatatgc

SEQ ID NO: 476460 - DNA, 49 bp, Homo sapiens; identical to SEQ ID NO: 339035
  chr6:38020529-38020578
  hypo
  prostate vs. sarcoma,melanoma

SEQ ID NO: 476461 - DNA, 154 bp, Homo sapiens; identical to SEQ ID NO: 464700
  chr6:41339068-41339222
  hypo
  prostate vs. bladder_and_urothelial

SEQ ID NO: 476462 - DNA, 360 bp, Homo sapiens; identical to SEQ ID NO: 358510
  chr6:41340027-41340387
  hypo
  prostate vs. myeloid_neoplasm

SEQ ID NO: 476463 - DNA, 171 bp, Homo sapiens; identical to SEQ ID NO: 339051
  chr6:41827211-41827382
  hypo
  prostate vs. melanoma,anorectal,cervical,non_cancer, breast,lung,bladder_and_urothelial,upper_gi,renal, lymphoid_neoplasm,head_and_neck,pancreas_gallbladder

SEQ ID NO: 476464 - DNA, 85 bp, Homo sapiens; identical to SEQ ID NO: 339061
  chr6:43814642-43814727
  hypo
  prostate vs. lung,breast,sarcoma,renal,ovary,uterine

SEQ ID NO: 476465 - DNA, 637 bp, Homo sapiens; identical to SEQ ID NO: 456077
  chr6:52227115-52227752
  hypo
  prostate vs. upper_gi,pancreas_gallbladder,colorectal

SEQ ID NO: 476466 - DNA, 179 bp, Homo sapiens; identical to SEQ ID NO: 459779
  chr6:74161321-74161500
  hypo
  prostate vs. cervical,sarcoma

SEQ ID NO: 476467 - DNA, 66 bp, Homo sapiens
  chr6:75985974-75986040
  hypo
  prostate vs. liver_bileduct,bladder_and_urothelial
cgtaaataaagtgtttacctgagttctatgagccgctctagcaaataaagcaaactcaaggagggc

SEQ ID NO: 476468 - DNA, 36 bp, Homo sapiens; identical to SEQ ID NO: 472272
  chr6:105750354-105750390
  hypo
  prostate vs. anorectal,melanoma,sarcoma

SEQ ID NO: 476469 - DNA, 83 bp, Homo sapiens; identical to SEQ ID NO: 364086
  chr6:105750646-105750729
  hypo
  prostate vs. anorectal,melanoma,sarcoma

SEQ ID NO: 476470 - DNA, 315 bp, Homo sapiens; identical to SEQ ID NO: 456088
  chr6:107810308-107810623
  hypo
  prostate vs. colorectal,ovary,anorectal,thyroid,uterine, non_cancer,myeloid_neoplasm,head_and_neck, bladder_and_urothelial

SEQ ID NO: 476471 - DNA, 128 bp, Homo sapiens; identical to SEQ ID NO: 346850
  chr6:107810665-107810793
  hypo
  prostate vs. colorectal,ovary,anorectal,thyroid,uterine, non_cancer,myeloid_neoplasm,head_and_neck, bladder_and_urothelial

SEQ ID NO: 476472 - DNA, 315 bp, Homo sapiens; identical to SEQ ID NO: 456088
  chr6:107810308-107810623
  hypo
  prostate vs. ovary,sarcoma,uterine,colorectal,anorectal

SEQ ID NO: 476473 - DNA, 430 bp, Homo sapiens; identical to SEQ ID NO: 350445
  chr6:107810665-107811095
  hypo
  prostate vs. ovary,sarcoma,uterine,colorectal,anorectal

SEQ ID NO: 476474 - DNA, 265 bp, Homo sapiens; identical to SEQ ID NO: 456094
  chr6:111409052-111409317
  hypo
  prostate vs. uterine,anorectal

SEQ ID NO: 476475 - DNA, 274 bp, Homo sapiens; identical to SEQ ID NO: 456095
  chr6:111409368-111409642
  hypo
  prostate vs. uterine,anorectal

SEQ ID NO: 476476 - DNA, 365 bp, Homo sapiens; identical to SEQ ID NO: 332922
  chr6:131383375-131383740
  hypo
  prostate vs. ovary,cervical,colorectal

SEQ ID NO: 476477 - DNA, 103 bp, Homo sapiens; identical to SEQ ID NO: 348168
  chr6:131455849-131455952
  hypo
  prostate vs. melanoma,pancreas_gallbladder,cervical, colorectal,head_and_neck,bladder_and_urothelial, lymphoid_neoplasm,breast,renal,thyroid,upper_gi,uterine, non_cancer

SEQ ID NO: 476478 - DNA, 41 bp, Homo sapiens; identical to SEQ ID NO: 339134
  chr6:136552688-136552729
  hypo
  prostate vs. upper_gi

SEQ ID NO: 476479 - DNA, 176 bp, Homo sapiens; identical to SEQ ID NO: 339136
  chr6:136682773-136682949
  hypo
  prostate vs. bladder_and_urothelial

SEQ ID NO: 476480 - DNA, 135 bp, Homo sapiens; identical to SEQ ID NO: 339137
  chr6:136901469-136901604
  hypo
  prostate vs. lung,sarcoma,melanoma

SEQ ID NO: 476481 - DNA, 249 bp, Homo sapiens; identical to SEQ ID NO: 332941
  chr6:138724531-138724780
  hypo
  prostate vs. liver_bileduct,breast, bladder_and_urothelial,pancreas_gallbladder

SEQ ID NO: 476482 - DNA, 528 bp, Homo sapiens; identical to SEQ ID NO: 346860
  chr6:146136035-146136563
  hypo
  prostate vs. lung,upper_gi,bladder_and_urothelial,renal, pancreas_gallbladder,head_and_neck,ovary,colorectal, myeloid_neoplasm,lymphoid_neoplasm,thyroid,breast, multiple_myeloma,melanoma,cervical,liver_bileduct,uterine

SEQ ID NO: 476483 - DNA, 231 bp, Homo sapiens; identical to SEQ ID NO: 475829
  chr6:146136565-146136796
  hypo
  prostate vs. lung,upper_gi,bladder_and_urothelial,renal, pancreas_gallbladder,head_and_neck,ovary,colorectal, myeloid_neoplasm,lymphoid_neoplasm,thyroid,breast, multiple_myeloma,melanoma,cervical,liver_bileduct,uterine

SEQ ID NO: 476484 - DNA, 45 bp, Homo sapiens
  chr6:151346267-151346312
  hypo
  prostate vs. lymphoid_neoplasm,colorectal,anorectal, bladder_and_urothelial,upper_gi,pancreas_gallbladder,uterine
cggttaccctcaccgcaccccaggtttgccgtagaaggatgagat

SEQ ID NO: 476485 - DNA, 37 bp, Homo sapiens; identical to SEQ ID NO: 364125
  chr6:151346372-151346409
  hypo
  prostate vs. lymphoid_neoplasm,colorectal,anorectal, bladder_and_urothelial,upper_gi,pancreas_gallbladder,uterine

SEQ ID NO: 476486 - DNA, 56 bp, Homo sapiens; identical to SEQ ID NO: 339169
  chr6:158321417-158321473
  hypo
  prostate vs. sarcoma

SEQ ID NO: 476487 - DNA, 65 bp, Homo sapiens; identical to SEQ ID NO: 339194
  chr6:166742989-166743054
  hypo
  prostate vs. bladder_and_urothelial

SEQ ID NO: 476488 - DNA, 316 bp, Homo sapiens; identical to SEQ ID NO: 339215
  chr6:170667214-170667530
  hypo
  prostate vs. sarcoma

SEQ ID NO: 476489 - DNA, 148 bp, Homo sapiens; identical to SEQ ID NO: 339216
  chr6:170871281-170871429
  hypo
  prostate vs. liver_bileduct,melanoma

SEQ ID NO: 476490 - DNA, 90 bp, Homo sapiens; identical to SEQ ID NO: 72679
  chr7:778947-779037
  hypo
  prostate vs. sarcoma

SEQ ID NO: 476491 - DNA, 176 bp, Homo sapiens; identical to SEQ ID NO: 348182
  chr7:920980-921156
  hypo
  prostate vs. lymphoid_neoplasm,renal,melanoma,cervical, anorectal,uterine,thyroid

SEQ ID NO: 476492 - DNA, 147 bp, Homo sapiens; identical to SEQ ID NO: 339320
  chr7:2068947-2069094
  hypo
  prostate vs. liver_bileduct,bladder_and_urothelial,lung, lymphoid_neoplasm,sarcoma

SEQ ID NO: 476493 - DNA, 382 bp, Homo sapiens; identical to SEQ ID NO: 339325
  chr7:2113550-2113932
  hypo
  prostate vs. head_and_neck,upper_gi,pancreas_gallbladder, cervical

SEQ ID NO: 476494 - DNA, 28 bp, Homo sapiens
  chr7:2232864-2232892
  hypo
  prostate vs. melanoma,lymphoid_neoplasm,renal,non_cancer, myeloid_neoplasm
cggcccaagccacgccccagcatactca

SEQ ID NO: 476495 - DNA, 237 bp, Homo sapiens; identical to SEQ ID NO: 457097
  chr7:2233056-2233293
  hypo
  prostate vs. melanoma,lymphoid_neoplasm,renal,non_cancer, myeloid_neoplasm

SEQ ID NO: 476496 - DNA, 55 bp, Homo sapiens; identical to SEQ ID NO: 339374
  chr7:5240151-5240206
  hypo
  prostate vs. bladder_and_urothelial,breast,lung

SEQ ID NO: 476497 - DNA, 145 bp, Homo sapiens; identical to SEQ ID NO: 339383
  chr7:6058662-6058807
  hypo
  prostate vs. bladder_and_urothelial

SEQ ID NO: 476498 - DNA, 68 bp, Homo sapiens; identical to SEQ ID NO: 465714
  chr7:6060523-6060591
  hypo
  prostate vs. lymphoid_neoplasm,melanoma

SEQ ID NO: 476499 - DNA, 105 bp, Homo sapiens; identical to SEQ ID NO: 465715
  chr7:6060612-6060717
  hypo
  prostate vs. lymphoid_neoplasm,melanoma

SEQ ID NO: 476500 - DNA, 71 bp, Homo sapiens; identical to SEQ ID NO: 353928
  chr7:6060772-6060843
  hypo
  prostate vs. lymphoid_neoplasm,melanoma

SEQ ID NO: 476501 - DNA, 76 bp, Homo sapiens; identical to SEQ ID NO: 339406
  chr7:7612745-7612821
  hypo
  prostate vs. liver_bileduct,sarcoma,lung,renal,melanoma, ovary,lymphoid_neoplasm,upper_gi,thyroid,bladder_and_urothelial, uterine

SEQ ID NO: 476502 - DNA, 157 bp, Homo sapiens; identical to SEQ ID NO: 339407
  chr7:7613138-7613295
  hypo
  prostate vs. liver_bileduct,lymphoid_neoplasm, pancreas_gallbladder,head_and_neck,colorectal,lung,upper_gi

SEQ ID NO: 476503 - DNA, 761 bp, Homo sapiens; identical to SEQ ID NO: 454479
  chr7:23510081-23510842
  hypo
  prostate vs. colorectal

SEQ ID NO: 476504 - DNA, 229 bp, Homo sapiens; identical to SEQ ID NO: 454480
  chr7:23513246-23513475
  hypo
  prostate vs. anorectal,uterine

SEQ ID NO: 476505 - DNA, 126 bp, Homo sapiens; identical to SEQ ID NO: 339438
  chr7:27831654-27831780
  hypo
  prostate vs. liver_bileduct,sarcoma,melanoma,colorectal, uterine,thyroid,upper_gi,renal,lymphoid_neoplasm,non_cancer, cervical,pancreas_gallbladder,ovary

SEQ ID NO: 476506 - DNA, 37 bp, Homo sapiens; identical to SEQ ID NO: 200915
  chr7:29186197-29186234
  hypo
  prostate vs. anorectal,uterine,head_and_neck, bladder_and_urothelial,thyroid,breast,myeloid_neoplasm,ovary, non_cancer,sarcoma

SEQ ID NO: 476507 - DNA, 339 bp, Homo sapiens; identical to SEQ ID NO: 475844
  chr7:32981774-32982113
  hypo
  prostate vs. renal

SEQ ID NO: 476508 - DNA, 344 bp, Homo sapiens; identical to SEQ ID NO: 358823
  chr7:32982270-32982614
  hypo
  prostate vs. renal

SEQ ID NO: 476509 - DNA, 687 bp, Homo sapiens; identical to SEQ ID NO: 371530
  chr7:32982270-32982957
  hypo
  prostate vs. renal,lung

SEQ ID NO: 476510 - DNA, 112 bp, Homo sapiens; identical to SEQ ID NO: 339481
  chr7:44611096-44611208
  hypo
  prostate vs. breast,lung,ovary,upper_gi, bladder_and_urothelial,head_and_neck,uterine,colorectal, cervical,lymphoid_neoplasm

SEQ ID NO: 476511 - DNA, 102 bp, Homo sapiens; identical to SEQ ID NO: 345274
  chr7:50344738-50344840
  hypo
  prostate vs. anorectal,non_cancer,myeloid_neoplasm, multiple_myeloma

SEQ ID NO: 476512 - DNA, 1 bp, Homo sapiens
  chr7:97925156-97925157
  hypo
  prostate vs. liver_bileduct
c

SEQ ID NO: 476513 - DNA, 352 bp, Homo sapiens; identical to SEQ ID NO: 354013
  chr7:97925221-97925573
  hypo
  prostate vs. liver_bileduct

SEQ ID NO: 476514 - DNA, 78 bp, Homo sapiens; identical to SEQ ID NO: 475848
  chr7:98971600-98971678
  hypo
  prostate vs. uterine,pancreas_gallbladder, myeloid_neoplasm,colorectal,lymphoid_neoplasm,ovary,cervical, non_cancer,upper_gi,breast

SEQ ID NO: 476515 - DNA, 396 bp, Homo sapiens; identical to SEQ ID NO: 346916
  chr7:98971810-98972206
  hypo
  prostate vs. uterine,pancreas_gallbladder, myeloid_neoplasm,colorectal,lymphoid_neoplasm,ovary,cervical, non_cancer,upper_gi,breast

SEQ ID NO: 476516 - DNA, 15 bp, Homo sapiens
  chr7:99156600-99156615
  hypo
  prostate vs. lymphoid_neoplasm,melanoma,sarcoma, liver_bileduct,anorectal,non_cancer,thyroid,multiple_myeloma, renal,head_and_neck
ccgccgtcaggagcc

SEQ ID NO: 476517 - DNA, 216 bp, Homo sapiens; identical to SEQ ID NO: 456137
  chr7:99156600-99156816
  hypo
  prostate vs. melanoma,sarcoma,anorectal,non_cancer, thyroid,lymphoid_neoplasm,renal,head_and_neck,multiple_myeloma, liver_bileduct

SEQ ID NO: 476518 - DNA, 77 bp, Homo sapiens; identical to SEQ ID NO: 345277
  chr7:99156982-99157059
  hypo
  prostate vs. melanoma,sarcoma,anorectal,non_cancer, thyroid,lymphoid_neoplasm,renal,head_and_neck,multiple_myeloma, liver_bileduct

SEQ ID NO: 476519 - DNA, 750 bp, Homo sapiens; identical to SEQ ID NO: 350641
  chr7:120496826-120497576
  hypo
  prostate vs. bladder_and_urothelial,colorectal,ovary, uterine,pancreas_gallbladder,sarcoma,lung,liver_bileduct

SEQ ID NO: 476520 - DNA, 88 bp, Homo sapiens; identical to SEQ ID NO: 457140
  chr7:127371042-127371130
  hypo
  prostate vs. liver_bileduct

SEQ ID NO: 476521 - DNA, 252 bp, Homo sapiens; identical to SEQ ID NO: 354050
  chr7:127371249-127371501
  hypo
  prostate vs. liver_bileduct

SEQ ID NO: 476522 - DNA, 209 bp, Homo sapiens; identical to SEQ ID NO: 474368
  chr7:127671450-127671659
  hypo
  prostate vs. cervical

SEQ ID NO: 476523 - DNA, 3 bp, Homo sapiens
  chr7:128097690-128097693
  hypo
  prostate vs. multiple_myeloma,sarcoma
tgc

SEQ ID NO: 476524 - DNA, 141 bp, Homo sapiens; identical to SEQ ID NO: 339631
  chr7:133630779-133630920
  hypo
  prostate vs. liver_bileduct,colorectal

SEQ ID NO: 476525 - DNA, 362 bp, Homo sapiens; identical to SEQ ID NO: 345285
  chr7:139930346-139930708
  hypo
  prostate vs. colorectal,multiple_myeloma,anorectal

SEQ ID NO: 476526 - DNA, 999 bp, Homo sapiens; identical to SEQ ID NO: 333283
  chr7:142985430-142986429
  hypo
  prostate vs. upper_gi,lung,bladder_and_urothelial, liver_bileduct,lymphoid_neoplasm,colorectal,breast, head_and_neck

SEQ ID NO: 476527 - DNA, 163 bp, Homo sapiens; identical to SEQ ID NO: 345926
  chr7:148851234-148851397
  hypo
  prostate vs. liver_bileduct

SEQ ID NO: 476528 - DNA, 351 bp, Homo sapiens; identical to SEQ ID NO: 333299
  chr7:150676178-150676529
  hypo
  prostate vs. colorectal,ovary

SEQ ID NO: 476529 - DNA, 149 bp, Homo sapiens
  chr7:152152776-152152925
  hypo
  prostate vs. breast,renal,head_and_neck,anorectal, lymphoid_neoplasm,lung,thyroid
cggtttattgttcgaacaatttgaacatttattaagtgccaacccttgtaaagaattacccagcaaccagaattcaacttggtcagcaggcaaggagtctcgatcagacaaactcgccattttgaaatatgaaaaattatgccgggcac

SEQ ID NO: 476530 - DNA, 103 bp, Homo sapiens; identical to SEQ ID NO: 339714
  chr7:156435920-156436023
  hypo
  prostate vs. liver_bileduct

SEQ ID NO: 476531 - DNA, 131 bp, Homo sapiens; identical to SEQ ID NO: 339721
  chr7:156974878-156975009
  hypo
  prostate vs. lung,breast,upper_gi

SEQ ID NO: 476532 - DNA, 458 bp, Homo sapiens; identical to SEQ ID NO: 339722
  chr7:157052694-157053152
  hypo
  prostate vs. liver_bileduct,lymphoid_neoplasm,colorectal, bladder_and_urothelial,head_and_neck,lung,melanoma,breast, sarcoma,pancreas_gallbladder,cervical,renal,uterine,upper_gi, ovary,thyroid,myeloid_neoplasm,anorectal,non_cancer,
  CONT. FROM ABOVE: multiple_myeloma

SEQ ID NO: 476533 - DNA, 177 bp, Homo sapiens; identical to SEQ ID NO: 339795
  chr7:158451052-158451229
  hypo
  prostate vs. bladder_and_urothelial,melanoma,sarcoma, breast,renal,upper_gi,anorectal,pancreas_gallbladder

SEQ ID NO: 476534 - DNA, 95 bp, Homo sapiens; identical to SEQ ID NO: 339827
  chr8:6633002-6633097
  hypo

SEQ ID NO: 476535 - DNA, 20 bp, Homo sapiens
  chr8:23020932-23020952
  hypo
  prostate vs. colorectal
cgaacgaacgaacgaacgaa

SEQ ID NO: 476536 - DNA, 25 bp, Homo sapiens
  chr8:23021107-23021132
  hypo
  prostate vs. colorectal
cggcccggtcgctcctgcccagccc

SEQ ID NO: 476537 - DNA, 127 bp, Homo sapiens; identical to SEQ ID NO: 345299
  chr8:23021590-23021717
  hypo
  prostate vs. colorectal

SEQ ID NO: 476538 - DNA, 197 bp, Homo sapiens; identical to SEQ ID NO: 454027
  chr8:23423722-23423919
  hypo
  prostate vs. melanoma,liver_bileduct,lymphoid_neoplasm, renal

SEQ ID NO: 476539 - DNA, 166 bp, Homo sapiens; identical to SEQ ID NO: 339901
  chr8:48801168-48801334
  hypo
  prostate vs. head_and_neck,melanoma,lung,sarcoma,ovary, upper_gi,bladder_and_urothelial

SEQ ID NO: 476540 - DNA, 239 bp, Homo sapiens; identical to SEQ ID NO: 453448
  chr8:60030908-60031147
  hypo
  prostate vs. thyroid,myeloid_neoplasm,non_cancer

SEQ ID NO: 476541 - DNA, 144 bp, Homo sapiens; identical to SEQ ID NO: 201426
  chr8:61822883-61823027
  hypo
  prostate vs. colorectal,ovary,non_cancer,thyroid, myeloid_neoplasm,uterine,bladder_and_urothelial, multiple_myeloma,upper_gi,cervical,pancreas_gallbladder

SEQ ID NO: 476542 - DNA, 55 bp, Homo sapiens; identical to SEQ ID NO: 346990
  chr8:72756949-72757004
  hypo
  prostate vs. sarcoma

SEQ ID NO: 476543 - DNA, 95 bp, Homo sapiens; identical to SEQ ID NO: 475879
  chr8:73448692-73448787
  hypo
  prostate vs. sarcoma

SEQ ID NO: 476544 - DNA, 253 bp, Homo sapiens; identical to SEQ ID NO: 475880
  chr8:73448832-73449085
  hypo
  prostate vs. sarcoma

SEQ ID NO: 476545 - DNA, 264 bp, Homo sapiens; identical to SEQ ID NO: 475881
  chr8:73449114-73449378
  hypo
  prostate vs. sarcoma

SEQ ID NO: 476546 - DNA, 208 bp, Homo sapiens; identical to SEQ ID NO: 459871
  chr8:73449432-73449640
  hypo
  prostate vs. sarcoma

SEQ ID NO: 476547 - DNA, 209 bp, Homo sapiens; identical to SEQ ID NO: 459875
  chr8:80803900-80804109
  hypo
  prostate vs. multiple_myeloma,thyroid

SEQ ID NO: 476548 - DNA, 71 bp, Homo sapiens; identical to SEQ ID NO: 339971
  chr8:92120822-92120893
  hypo
  prostate vs. sarcoma,pancreas_gallbladder,head_and_neck, anorectal

SEQ ID NO: 476549 - DNA, 248 bp, Homo sapiens; identical to SEQ ID NO: 286033
  chr8:94712881-94713129
  hypo
  prostate vs. sarcoma,cervical,ovary,anorectal, head_and_neck,uterine

SEQ ID NO: 476550 - DNA, 249 bp, Homo sapiens; identical to SEQ ID NO: 475888
  chr8:94712881-94713130
  hypo
  prostate vs. sarcoma,ovary,cervical,anorectal,thyroid, uterine,bladder_and_urothelial,non_cancer,breast

SEQ ID NO: 476551 - DNA, 60 bp, Homo sapiens; identical to SEQ ID NO: 339975
  chr8:94747749-94747809
  hypo
  prostate vs. lung,bladder_and_urothelial,colorectal, breast

SEQ ID NO: 476552 - DNA, 59 bp, Homo sapiens
  chr8:95816370-95816429
  hypo
  prostate vs. breast,pancreas_gallbladder, lymphoid_neoplasm,renal,ovary
cgttttcatttatagccactgttagtaatgaggaaagacagcagaaaagaaagctcagt

SEQ ID NO: 476553 - DNA, 29 bp, Homo sapiens
  chr8:97657762-97657791
  hypo
  prostate vs. renal
cgctcattcgggggcgtgacgggaggacc

SEQ ID NO: 476554 - DNA, 419 bp, Homo sapiens; identical to SEQ ID NO: 475891
  chr8:99954762-99955181
  hypo
  prostate vs. anorectal

SEQ ID NO: 476555 - DNA, 28 bp, Homo sapiens
  chr8:101717065-101717093
  hypo
  prostate vs. breast,uterine,anorectal,lung,renal
cgatgtaagtgttctgtacaattaagtc

SEQ ID NO: 476556 - DNA, 39 bp, Homo sapiens; identical to SEQ ID NO: 364778
  chr8:101717122-101717161
  hypo
  prostate vs. breast,uterine,anorectal,lung,renal

SEQ ID NO: 476557 - DNA, 221 bp, Homo sapiens; identical to SEQ ID NO: 340002
  chr8:118531602-118531823
  hypo
  prostate vs. renal,sarcoma,liver_bileduct,head_and_neck, anorectal,non_cancer,cervical,thyroid,lymphoid_neoplasm

SEQ ID NO: 476558 - DNA, 90 bp, Homo sapiens; identical to SEQ ID NO: 340003
  chr8:119057056-119057146
  hypo
  prostate vs. renal

SEQ ID NO: 476559 - DNA, 62 bp, Homo sapiens; identical to SEQ ID NO: 340014
  chr8:125498221-125498283
  hypo
  prostate vs. head_and_neck,bladder_and_urothelial, anorectal,melanoma,renal

SEQ ID NO: 476560 - DNA, 49 bp, Homo sapiens; identical to SEQ ID NO: 340015
  chr8:125498538-125498587
  hypo
  prostate vs. renal

SEQ ID NO: 476561 - DNA, 200 bp, Homo sapiens; identical to SEQ ID NO: 340022
  chr8:126061282-126061482
  hypo
  prostate vs. breast,head_and_neck

SEQ ID NO: 476562 - DNA, 106 bp, Homo sapiens; identical to SEQ ID NO: 475895
  chr8:131455079-131455185
  hypo
  prostate vs. anorectal

SEQ ID NO: 476563 - DNA, 123 bp, Homo sapiens; identical to SEQ ID NO: 378690
  chr8:134268431-134268554
  hypo
  prostate vs. ovary

SEQ ID NO: 476564 - DNA, 66 bp, Homo sapiens; identical to SEQ ID NO: 340041
  chr8:135805728-135805794
  hypo
  prostate vs. breast,head_and_neck,bladder_and_urothelial, cervical,uterine,lymphoid_neoplasm,ovary

SEQ ID NO: 476565 - DNA, 231 bp, Homo sapiens; identical to SEQ ID NO: 340131
  chr8:144575951-144576182
  hypo
  prostate vs. renal

SEQ ID NO: 476566 - DNA, 394 bp, Homo sapiens; identical to SEQ ID NO: 350842
  chr8:144640377-144640771
  hypo
  prostate vs. pancreas_gallbladder,renal,head_and_neck, melanoma,colorectal

SEQ ID NO: 476567 - DNA, 878 bp, Homo sapiens; identical to SEQ ID NO: 333605
  chr9:503936-504814
  hypo
  prostate vs. ovary,breast

SEQ ID NO: 476568 - DNA, 569 bp, Homo sapiens; identical to SEQ ID NO: 464823
  chr9:27528536-27529105
  hypo
  prostate vs. head_and_neck,multiple_myeloma,renal, pancreas_gallbladder,non_cancer,bladder_and_urothelial, colorectal,upper_gi,melanoma,anorectal,myeloid_neoplasm,thyroid, ovary,breast,cervical,uterine,liver_bileduct,lymphoid_neoplasm,
  CONT. FROM ABOVE: lung

SEQ ID NO: 476569 - DNA, 182 bp, Homo sapiens; identical to SEQ ID NO: 201692
  chr9:27529157-27529339
  hypo
  prostate vs. head_and_neck,multiple_myeloma,renal, pancreas_gallbladder,non_cancer,bladder_and_urothelial, colorectal,upper_gi,melanoma,anorectal,myeloid_neoplasm,thyroid, ovary,breast,cervical,uterine,liver_bileduct,lymphoid_neoplasm,
  CONT. FROM ABOVE: lung

SEQ ID NO: 476570 - DNA, 130 bp, Homo sapiens; identical to SEQ ID NO: 464825
  chr9:27529341-27529471
  hypo
  prostate vs. head_and_neck,multiple_myeloma,renal, pancreas_gallbladder,non_cancer,bladder_and_urothelial, colorectal,upper_gi,melanoma,anorectal,myeloid_neoplasm,thyroid, ovary,breast,cervical,uterine,liver_bileduct,lymphoid_neoplasm,
  CONT. FROM ABOVE: lung

SEQ ID NO: 476571 - DNA, 129 bp, Homo sapiens; identical to SEQ ID NO: 464826
  chr9:27528976-27529105
  hypo
  prostate vs. pancreas_gallbladder,non_cancer,melanoma, colorectal,myeloid_neoplasm,anorectal,bladder_and_urothelial, thyroid,upper_gi,head_and_neck,multiple_myeloma,renal,cervical, uterine,breast,ovary,lymphoid_neoplasm,liver_bileduct,lung

SEQ ID NO: 476572 - DNA, 182 bp, Homo sapiens; identical to SEQ ID NO: 201692
  chr9:27529157-27529339
  hypo
  prostate vs. pancreas_gallbladder,non_cancer,melanoma, colorectal,myeloid_neoplasm,anorectal,bladder_and_urothelial, thyroid,upper_gi,head_and_neck,multiple_myeloma,renal,cervical, uterine,breast,ovary,lymphoid_neoplasm,liver_bileduct,lung

SEQ ID NO: 476573 - DNA, 566 bp, Homo sapiens; identical to SEQ ID NO: 464828
  chr9:27529341-27529907
  hypo
  prostate vs. pancreas_gallbladder,non_cancer,melanoma, colorectal,myeloid_neoplasm,anorectal,bladder_and_urothelial, thyroid,upper_gi,head_and_neck,multiple_myeloma,renal,cervical, uterine,breast,ovary,lymphoid_neoplasm,liver_bileduct,lung

SEQ ID NO: 476574 - DNA, 242 bp, Homo sapiens; identical to SEQ ID NO: 464831
  chr9:37035886-37036128
  hypo
  prostate vs. ovary

SEQ ID NO: 476575 - DNA, 238 bp, Homo sapiens; identical to SEQ ID NO: 463087
  chr9:37035890-37036128
  hypo
  prostate vs. myeloid_neoplasm,non_cancer,uterine,thyroid

SEQ ID NO: 476576 - DNA, 96 bp, Homo sapiens; identical to SEQ ID NO: 340216
  chr9:80007524-80007620
  hypo
  prostate vs. lung,liver_bileduct,breast,uterine, head_and_neck,pancreas_gallbladder,lymphoid_neoplasm

SEQ ID NO: 476577 - DNA, 92 bp, Homo sapiens; identical to SEQ ID NO: 340227
  chr9:88661274-88661366
  hypo
  prostate vs. melanoma

SEQ ID NO: 476578 - DNA, 545 bp, Homo sapiens; identical to SEQ ID NO: 461329
  chr9:93955385-93955930
  hypo
  prostate vs. pancreas_gallbladder,cervical, lymphoid_neoplasm,ovary,myeloid_neoplasm,non_cancer, multiple_myeloma,uterine,colorectal,renal,sarcoma

SEQ ID NO: 476579 - DNA, 82 bp, Homo sapiens; identical to SEQ ID NO: 461330
  chr9:93956177-93956259
  hypo
  prostate vs. pancreas_gallbladder,cervical, lymphoid_neoplasm,ovary,myeloid_neoplasm,non_cancer, multiple_myeloma,uterine,colorectal,renal,sarcoma

SEQ ID NO: 476580 - DNA, 156 bp, Homo sapiens; identical to SEQ ID NO: 453504
  chr9:93955774-93955930
  hypo
  prostate vs. pancreas_gallbladder,cervical, myeloid_neoplasm,colorectal,non_cancer,ovary

SEQ ID NO: 476581 - DNA, 268 bp, Homo sapiens; identical to SEQ ID NO: 453505
  chr9:93956177-93956445
  hypo
  prostate vs. pancreas_gallbladder,cervical, myeloid_neoplasm,colorectal,non_cancer,ovary

SEQ ID NO: 476582 - DNA, 132 bp, Homo sapiens
  chr9:100843158-100843290
  hypo
  prostate vs. head_and_neck,sarcoma,melanoma, lymphoid_neoplasm,colorectal,anorectal,liver_bileduct, multiple_myeloma,cervical,non_cancer,renal,myeloid_neoplasm, thyroid
cgatatctgtggccgcagtggctctgggggccaaggtgttggaacgtcacataactttggacaagacctggaaggggagtgaccactcggcctcgctggagcctggagaactggccgagctggtgcggtcag

SEQ ID NO: 476583 - DNA, 957 bp, Homo sapiens; identical to SEQ ID NO: 470850
  chr9:116811431-116812388
  hypo
  prostate vs. lung,renal,liver_bileduct,uterine,breast

SEQ ID NO: 476584 - DNA, 398 bp, Homo sapiens; identical to SEQ ID NO: 340301
  chr9:123210124-123210522
  hypo
  prostate vs. bladder_and_urothelial,anorectal,colorectal, liver_bileduct,breast

SEQ ID NO: 476585 - DNA, 754 bp, Homo sapiens; identical to SEQ ID NO: 459900
  chr9:124132057-124132811
  hypo
  prostate vs. liver_bileduct,head_and_neck

SEQ ID NO: 476586 - DNA, 179 bp, Homo sapiens; identical to SEQ ID NO: 340310
  chr9:126092355-126092534
  hypo
  prostate vs. breast,lung,bladder_and_urothelial

SEQ ID NO: 476587 - DNA, 139 bp, Homo sapiens; identical to SEQ ID NO: 340324
  chr9:128274083-128274222
  hypo
  prostate vs. lymphoid_neoplasm

SEQ ID NO: 476588 - DNA, 116 bp, Homo sapiens; identical to SEQ ID NO: 340330
  chr9:129645183-129645299
  hypo
  prostate vs. bladder_and_urothelial

SEQ ID NO: 476589 - DNA, 329 bp, Homo sapiens; identical to SEQ ID NO: 340378
  chr9:135267105-135267434
  hypo
  prostate vs. head_and_neck,breast,lung, bladder_and_urothelial,liver_bileduct,cervical

SEQ ID NO: 476590 - DNA, 231 bp, Homo sapiens; identical to SEQ ID NO: 340379
  chr9:135275329-135275560
  hypo
  prostate vs. lung

SEQ ID NO: 476591 - DNA, 141 bp, Homo sapiens; identical to SEQ ID NO: 340384
  chr9:135523845-135523986
  hypo
  prostate vs. melanoma,lung,sarcoma

SEQ ID NO: 476592 - DNA, 185 bp, Homo sapiens; identical to SEQ ID NO: 340424
  chr9:138719269-138719454
  hypo
  prostate vs. head_and_neck,pancreas_gallbladder,melanoma, sarcoma,bladder_and_urothelial,uterine,ovary,breast,colorectal, lung,liver_bileduct,upper_gi,anorectal,renal,cervical, lymphoid_neoplasm,non_cancer,thyroid

SEQ ID NO: 476593 - DNA, 145 bp, Homo sapiens; identical to SEQ ID NO: 457230
  chr9:139317510-139317655
  hypo
  prostate vs. liver_bileduct,lymphoid_neoplasm,renal, sarcoma,cervical,anorectal,upper_gi,colorectal,non_cancer,ovary, thyroid,pancreas_gallbladder

SEQ ID NO: 476594 - DNA, 380 bp, Homo sapiens; identical to SEQ ID NO: 345987
  chr9:139317866-139318246
  hypo
  prostate vs. liver_bileduct,lymphoid_neoplasm,renal, sarcoma,cervical,anorectal,upper_gi,colorectal,non_cancer,ovary, thyroid,pancreas_gallbladder

SEQ ID NO: 476595 - DNA, 233 bp, Homo sapiens; identical to SEQ ID NO: 340442
  chr9:139374838-139375071
  hypo
  prostate vs. lung,ovary,melanoma,sarcoma

SEQ ID NO: 476596 - DNA, 206 bp, Homo sapiens; identical to SEQ ID NO: 454068
  chr9:139698453-139698659
  hypo
  prostate vs. lymphoid_neoplasm

SEQ ID NO: 476597 - DNA, 21 bp, Homo sapiens
  chr9:139699253-139699274
  hypo
  prostate vs. lymphoid_neoplasm
cggagaccctgaaatgtaagc

SEQ ID NO: 476598 - DNA, 637 bp, Homo sapiens; identical to SEQ ID NO: 475929
  chr9:140196486-140197123
  hypo
  prostate vs. ovary,breast,cervical,uterine,colorectal

SEQ ID NO: 476599 - DNA, 155 bp, Homo sapiens; identical to SEQ ID NO: 347067
  chr9:140197263-140197418
  hypo
  prostate vs. ovary,breast,cervical,uterine,colorectal

SEQ ID NO: 476600 - DNA, 74 bp, Homo sapiens; identical to SEQ ID NO: 455490
  chrX:44922889-44922963
  hypo
  prostate vs. sarcoma,myeloid_neoplasm

SEQ ID NO: 476601 - DNA, 17 bp, Homo sapiens
  chrX:44923014-44923031
  hypo
  prostate vs. sarcoma,myeloid_neoplasm
agcagcgcagaggagcc

SEQ ID NO: 476602 - DNA, 431 bp, Homo sapiens; identical to SEQ ID NO: 344915
  chrY:14776368-14776799
  hypo
  prostate vs. breast,ovary,uterine,cervical,colorectal, anorectal

SEQ ID NO: 476603 - DNA, 624 bp, Homo sapiens; identical to SEQ ID NO: 454529
  chrY:16636060-16636684
  hypo
  prostate vs. breast,cervical,ovary,uterine,thyroid, non_cancer,anorectal

SEQ ID NO: 476604 - DNA, 949 bp, Homo sapiens; identical to SEQ ID NO: 454530
  chrY:16636193-16637142
  hypo
  prostate vs. anorectal,breast,ovary,cervical,uterine, sarcoma,non_cancer,thyroid

SEQ ID NO: 476605 - DNA, 208 bp, Homo sapiens; identical to SEQ ID NO: 356619
  chrY:21205113-21205321
  hypo
  prostate vs. breast

SEQ ID NO: 476606 - DNA, 326 bp, Homo sapiens
  chrY:21208492-21208818
  hypo
  prostate vs. breast
cgccttggagcagggggcggcgctcgttggggaggctcaggccgcgctggagcggggagtggggggaactcaggcatggcgggttgcaggtgtggagccctgccctggggtaggcaactaaggcctggcgataaatcaagcgcagcgcggatgggccagcgctgctggggtagccggcgcacactccgcagttgctggcctgggtgctaagctcctcactgcccggggctggcagggccagccgctcccagtgcgggccctccaagcccaagtccactcggaactctagctcgccggcaagcgccgcgcgcagcccgggttcccgc

SEQ ID NO: 476607 - DNA, 1 bp, Homo sapiens
  chrY:22918423-22918424
  hypo
  prostate vs. breast,cervical,ovary,uterine,non_cancer, anorectal,sarcoma,thyroid,lymphoid_neoplasm
c

SEQ ID NO: 476608 - DNA, 122 bp, Homo sapiens; identical to SEQ ID NO: 346299
  chrY:22918582-22918704
  hypo
  prostate vs. breast,cervical,ovary,uterine,non_cancer, anorectal,sarcoma,thyroid,lymphoid_neoplasm

SEQ ID NO: 476609 - DNA, 584 bp, Homo sapiens; identical to SEQ ID NO: 336742
  AC211344.3_7702-13588:3943-4527
  hyper
  renal vs. colorectal,multiple_myeloma

SEQ ID NO: 476610 - DNA, 2 bp, Homo sapiens
  chr1:2472146-2472148
  hyper
  renal vs. anorectal,myeloid_neoplasm,non_cancer,thyroid, bladder_and_urothelial
cg

SEQ ID NO: 476611 - DNA, 220 bp, Homo sapiens; identical to SEQ ID NO: 455498
  chr1:6479997-6480217
  hyper
  renal vs. anorectal,myeloid_neoplasm,upper_gi

SEQ ID NO: 476612 - DNA, 54 bp, Homo sapiens; identical to SEQ ID NO: 455499
  chr1:6507073-6507127
  hyper
  renal vs. multiple_myeloma,myeloid_neoplasm,uterine, non_cancer,thyroid,anorectal,pancreas_gallbladder,prostate, bladder_and_urothelial,cervical,melanoma,lymphoid_neoplasm,lung, upper_gi

SEQ ID NO: 476613 - DNA, 3 bp, Homo sapiens
  chr1:6509144-6509147
  hyper
  renal vs. sarcoma
acc

SEQ ID NO: 476614 - DNA, 426 bp, Homo sapiens; identical to SEQ ID NO: 457245
  chr1:9711649-9712075
  hyper
  renal vs. lymphoid_neoplasm,sarcoma,prostate, myeloid_neoplasm,non_cancer,thyroid,multiple_myeloma

SEQ ID NO: 476615 - DNA, 64 bp, Homo sapiens; identical to SEQ ID NO: 346318
  chr1:12123950-12124014
  hyper
  renal vs. thyroid,lymphoid_neoplasm,multiple_myeloma, non_cancer

SEQ ID NO: 476616 - DNA, 517 bp, Homo sapiens; identical to SEQ ID NO: 455503
  chr1:12226892-12227409
  hyper
  renal vs. ovary

SEQ ID NO: 476617 - DNA, 207 bp, Homo sapiens; identical to SEQ ID NO: 455504
  chr1:12227438-12227645
  hyper
  renal vs. ovary

SEQ ID NO: 476618 - DNA, 247 bp, Homo sapiens; identical to SEQ ID NO: 455505
  chr1:12227162-12227409
  hyper
  renal vs. ovary,cervical

SEQ ID NO: 476619 - DNA, 207 bp, Homo sapiens; identical to SEQ ID NO: 455504
  chr1:12227438-12227645
  hyper
  renal vs. ovary,cervical

SEQ ID NO: 476620 - DNA, 3 bp, Homo sapiens
  chr1:14027196-14027199
  hyper
  renal vs. lymphoid_neoplasm,ovary,uterine,anorectal, multiple_myeloma,head_and_neck,breast,non_cancer, myeloid_neoplasm,prostate,lung,cervical,bladder_and_urothelial, colorectal,thyroid,melanoma
gcc

SEQ ID NO: 476621 - DNA, 33 bp, Homo sapiens; identical to SEQ ID NO: 454089
  chr1:25255579-25255612
  hyper
  renal vs. lymphoid_neoplasm,cervical,myeloid_neoplasm

SEQ ID NO: 476622 - DNA, 7 bp, Homo sapiens
  chr1:25255934-25255941
  hyper
  renal vs. lymphoid_neoplasm,cervical,myeloid_neoplasm
agccaga

SEQ ID NO: 476623 - DNA, 135 bp, Homo sapiens; identical to SEQ ID NO: 475232
  chr1:28198925-28199060
  hyper
  renal vs. ovary

SEQ ID NO: 476624 - DNA, 300 bp, Homo sapiens; identical to SEQ ID NO: 462213
  chr1:32930159-32930459
  hyper
  renal vs. ovary,sarcoma,uterine

SEQ ID NO: 476625 - DNA, 62 bp, Homo sapiens; identical to SEQ ID NO: 462214
  chr1:32930558-32930620
  hyper
  renal vs. ovary,sarcoma,uterine

SEQ ID NO: 476626 - DNA, 63 bp, Homo sapiens
  chr1:39043982-39044045
  hyper
  renal vs. ovary,myeloid_neoplasm,sarcoma, multiple_myeloma,thyroid
cggagatggaaggagccgaagggaccagagagagcgtggacgggaggaagacagacacgaaga

SEQ ID NO: 476627 - DNA, 66 bp, Homo sapiens; identical to SEQ ID NO: 356738
  chr1:39044466-39044532
  hyper
  renal vs. ovary,myeloid_neoplasm,sarcoma, multiple_myeloma,thyroid

SEQ ID NO: 476628 - DNA, 237 bp, Homo sapiens; identical to SEQ ID NO: 349223
  chr1:41268046-41268283
  hyper
  renal vs. ovary,multiple_myeloma,cervical, pancreas_gallbladder

SEQ ID NO: 476629 - DNA, 932 bp, Homo sapiens; identical to SEQ ID NO: 472495
  chr1:46767970-46768902
  hyper
  renal vs. lymphoid_neoplasm,upper_gi,liver_bileduct, pancreas_gallbladder,lung,breast,multiple_myeloma,sarcoma, melanoma,prostate,colorectal,head_and_neck,cervical,anorectal, non_cancer,myeloid_neoplasm,thyroid,bladder_and_urothelial

SEQ ID NO: 476630 - DNA, 982 bp, Homo sapiens; identical to SEQ ID NO: 472496
  chr1:46768416-46769398
  hyper
  renal vs. lymphoid_neoplasm,liver_bileduct,upper_gi,lung, pancreas_gallbladder,head_and_neck,multiple_myeloma,breast, colorectal,sarcoma,prostate,cervical,melanoma,non_cancer, anorectal,myeloid_neoplasm,thyroid,bladder_and_urothelial

SEQ ID NO: 476631 - DNA, 931 bp, Homo sapiens; identical to SEQ ID NO: 472497
  chr1:46768904-46769835
  hyper
  renal vs. lymphoid_neoplasm,lung,liver_bileduct,upper_gi, multiple_myeloma,melanoma,sarcoma,colorectal,breast, pancreas_gallbladder,cervical,head_and_neck,prostate,anorectal, non_cancer,myeloid_neoplasm,thyroid,bladder_and_urothelial

SEQ ID NO: 476632 - DNA, 5 bp, Homo sapiens
  chr1:46998908-46998913
  hyper
  renal vs. head_and_neck,cervical,bladder_and_urothelial
cgcgg

SEQ ID NO: 476633 - DNA, 536 bp, Homo sapiens; identical to SEQ ID NO: 462227
  chr1:85462747-85463283
  hyper
  renal vs. uterine

SEQ ID NO: 476634 - DNA, 61 bp, Homo sapiens; identical to SEQ ID NO: 455537
  chr1:91185065-91185126
  hyper
  renal vs. multiple_myeloma

SEQ ID NO: 476635 - DNA, 171 bp, Homo sapiens; identical to SEQ ID NO: 455538
  chr1:92948154-92948325
  hyper
  renal vs. multiple_myeloma

SEQ ID NO: 476636 - DNA, 142 bp, Homo sapiens; identical to SEQ ID NO: 344962
  chr1:92949466-92949608
  hyper
  renal vs. multiple_myeloma,myeloid_neoplasm,non_cancer, thyroid,bladder_and_urothelial,uterine,ovary

SEQ ID NO: 476637 - DNA, 226 bp, Homo sapiens; identical to SEQ ID NO: 452727
  chr1:92949466-92949692
  hyper
  renal vs. multiple_myeloma,non_cancer,myeloid_neoplasm, thyroid,uterine,colorectal,bladder_and_urothelial

SEQ ID NO: 476638 - DNA, 27 bp, Homo sapiens
  chr1:92949665-92949692
  hyper
  renal vs. multiple_myeloma,non_cancer,uterine, myeloid_neoplasm,colorectal,thyroid
cggggggaggggggaacagaacacaag

SEQ ID NO: 476639 - DNA, 228 bp, Homo sapiens; identical to SEQ ID NO: 452729
  chr1:92950207-92950435
  hyper
  renal vs. multiple_myeloma,non_cancer,uterine, myeloid_neoplasm,colorectal,thyroid

SEQ ID NO: 476640 - DNA, 228 bp, Homo sapiens; identical to SEQ ID NO: 452729
  chr1:92950207-92950435
  hyper
  renal vs. multiple_myeloma,sarcoma,non_cancer

SEQ ID NO: 476641 - DNA, 185 bp, Homo sapiens; identical to SEQ ID NO: 455547
  chr1:101774910-101775095
  hyper
  renal vs. multiple_myeloma,head_and_neck

SEQ ID NO: 476642 - DNA, 25 bp, Homo sapiens
  chr1:101775488-101775513
  hyper
  renal vs. multiple_myeloma,head_and_neck
ctcttgtgttgcacttgtgtccccc

SEQ ID NO: 476643 - DNA, 306 bp, Homo sapiens; identical to SEQ ID NO: 452735
  chr1:108506290-108506596
  hyper
  renal vs. multiple_myeloma,myeloid_neoplasm,non_cancer, thyroid

SEQ ID NO: 476644 - DNA, 113 bp, Homo sapiens; identical to SEQ ID NO: 349296
  chr1:109204221-109204334
  hyper
  renal vs. cervical,multiple_myeloma,non_cancer

SEQ ID NO: 476645 - DNA, 122 bp, Homo sapiens; identical to SEQ ID NO: 462242
  chr1:109656099-109656221
  hyper
  renal vs. breast,anorectal,prostate,thyroid

SEQ ID NO: 476646 - DNA, 204 bp, Homo sapiens; identical to SEQ ID NO: 462243
  chr1:109656291-109656495
  hyper
  renal vs. breast,anorectal,prostate,thyroid

SEQ ID NO: 476647 - DNA, 63 bp, Homo sapiens; identical to SEQ ID NO: 462244
  chr1:109656432-109656495
  hyper
  renal vs. breast,anorectal,prostate,non_cancer, myeloid_neoplasm

SEQ ID NO: 476648 - DNA, 116 bp, Homo sapiens; identical to SEQ ID NO: 344968
  chr1:109657070-109657186
  hyper
  renal vs. breast,anorectal,prostate,non_cancer, myeloid_neoplasm

SEQ ID NO: 476649 - DNA, 245 bp, Homo sapiens; identical to SEQ ID NO: 462256
  chr1:154474305-154474550
  hyper
  renal vs. ovary

SEQ ID NO: 476650 - DNA, 1 bp, Homo sapiens
  chr1:154971620-154971621
  hyper
  renal vs. pancreas_gallbladder
c

SEQ ID NO: 476651 - DNA, 216 bp, Homo sapiens; identical to SEQ ID NO: 278869
  chr1:154971706-154971922
  hyper
  renal vs. pancreas_gallbladder

SEQ ID NO: 476652 - DNA, 456 bp, Homo sapiens; identical to SEQ ID NO: 475264
  chr1:154971924-154972380
  hyper
  renal vs. pancreas_gallbladder

SEQ ID NO: 476653 - DNA, 294 bp, Homo sapiens
  chr1:199998439-199998733
  hyper
  renal vs. myeloid_neoplasm,liver_bileduct,ovary
gttgagctgggtcgggagaccacgcacgccgatccctcacagtctcccccacaccccatgggtgaattaaagagggtaaggtaggggaaagagacgctgttgcacttttctctgcaaccctggaagaactgtgtttccagctaccgcacgcgcaactcacatcgcaagggaccgaggcggtacactctgagcgtaaacagagaacacctgcagctctggaatcggtcccaccgcagagggctgggaaccggaggactgtcggtccagcccataaggggctgctggggactaaac

SEQ ID NO: 476654 - DNA, 218 bp, Homo sapiens
  chr1:200008298-200008516
  hyper
  renal vs. liver_bileduct,anorectal
cggagaggaggggagagagaagggaggcgagagaaagaggagagagacccctgccgatcctgagccagagggcggtggagggaggggaaggagtcgcccgagccgtccgggagcagtggcagcggcacagccggggcggcaatagcagccccgcggtcgcctccgctgcccgccgggagctcggcggttcacggctccgcgccccgggcagctgcgtc

SEQ ID NO: 476655 - DNA, 355 bp, Homo sapiens; identical to SEQ ID NO: 349370
  chr1:200008691-200009046
  hyper
  renal vs. liver_bileduct,anorectal

SEQ ID NO: 476656 - DNA, 207 bp, Homo sapiens; identical to SEQ ID NO: 465977
  chr1:201368376-201368583
  hyper
  renal vs. liver_bileduct,pancreas_gallbladder

SEQ ID NO: 476657 - DNA, 122 bp, Homo sapiens; identical to SEQ ID NO: 465978
  chr1:201368727-201368849
  hyper
  renal vs. liver_bileduct,pancreas_gallbladder

SEQ ID NO: 476658 - DNA, 29 bp, Homo sapiens
  chr1:208084683-208084712
  hyper
  renal vs. multiple_myeloma
tggaggtttgttcgggctccagatgcctc

SEQ ID NO: 476659 - DNA, 198 bp, Homo sapiens; identical to SEQ ID NO: 455570
  chr1:220700617-220700815
  hyper
  renal vs. ovary

SEQ ID NO: 476660 - DNA, 917 bp, Homo sapiens; identical to SEQ ID NO: 462280
  chr1:226925659-226926576
  hyper
  renal vs. ovary

SEQ ID NO: 476661 - DNA, 25 bp, Homo sapiens
  chr1:228644877-228644902
  hyper
  renal vs. melanoma,thyroid
cgagggttccctgttgttaacagaa

SEQ ID NO: 476662 - DNA, 588 bp, Homo sapiens; identical to SEQ ID NO: 455574
  chr1:231175062-231175650
  hyper
  renal vs. ovary,colorectal,melanoma,anorectal

SEQ ID NO: 476663 - DNA, 286 bp, Homo sapiens; identical to SEQ ID NO: 455575
  chr1:231175692-231175978
  hyper
  renal vs. ovary,colorectal,melanoma,anorectal

SEQ ID NO: 476664 - DNA, 166 bp, Homo sapiens; identical to SEQ ID NO: 455576
  chr1:231175484-231175650
  hyper
  renal vs. ovary,colorectal

SEQ ID NO: 476665 - DNA, 709 bp, Homo sapiens; identical to SEQ ID NO: 349428
  chr1:231175692-231176401
  hyper
  renal vs. ovary,colorectal

SEQ ID NO: 476666 - DNA, 57 bp, Homo sapiens; identical to SEQ ID NO: 345362
  chr10:93647662-93647719
  hyper
  renal vs. ovary,uterine,anorectal,non_cancer

SEQ ID NO: 476667 - DNA, 179 bp, Homo sapiens; identical to SEQ ID NO: 459325
  chr10:94450726-94450905
  hyper
  renal vs. myeloid_neoplasm,anorectal,thyroid,cervical, lymphoid_neoplasm

SEQ ID NO: 476668 - DNA, 644 bp, Homo sapiens; identical to SEQ ID NO: 459326
  chr10:94450726-94451370
  hyper
  renal vs. liver_bileduct,cervical

SEQ ID NO: 476669 - DNA, 231 bp, Homo sapiens; identical to SEQ ID NO: 455594
  chr10:98272415-98272646
  hyper
  renal vs. pancreas_gallbladder,colorectal,ovary,cervical, sarcoma,uterine,anorectal

SEQ ID NO: 476670 - DNA, 420 bp, Homo sapiens; identical to SEQ ID NO: 455595
  chr10:98272768-98273188
  hyper
  renal vs. pancreas_gallbladder,colorectal,ovary,cervical, sarcoma,uterine,anorectal

SEQ ID NO: 476671 - DNA, 715 bp, Homo sapiens; identical to SEQ ID NO: 351083
  chr10:98272768-98273483
  hyper
  renal vs. pancreas_gallbladder

SEQ ID NO: 476672 - DNA, 73 bp, Homo sapiens; identical to SEQ ID NO: 473620
  chr10:102475189-102475262
  hyper
  renal vs. myeloid_neoplasm

SEQ ID NO: 476673 - DNA, 116 bp, Homo sapiens
  chr10:102501611-102501727
  hyper
  renal vs. anorectal,myeloid_neoplasm,thyroid,non_cancer, prostate
cgcgctgtggggagcatttcctggggagatgcatttaatttcggaatttctaatcccctccctcagaccccggtcctagctcccctagccgctccccgggaagtggaaggaggaag

SEQ ID NO: 476674 - DNA, 258 bp, Homo sapiens; identical to SEQ ID NO: 472510
  chr10:102585797-102586055
  hyper
  renal vs. anorectal,non_cancer,thyroid,multiple_myeloma, myeloid_neoplasm,prostate,sarcoma,melanoma,breast,colorectal, lung

SEQ ID NO: 476675 - DNA, 109 bp, Homo sapiens; identical to SEQ ID NO: 202224
  chr10:102587493-102587602
  hyper
  renal vs. anorectal,breast,myeloid_neoplasm,thyroid, prostate,non_cancer,melanoma,colorectal,sarcoma,lung

SEQ ID NO: 476676 - DNA, 110 bp, Homo sapiens; identical to SEQ ID NO: 472512
  chr10:102587493-102587603
  hyper
  renal vs. breast,sarcoma,thyroid,colorectal, myeloid_neoplasm,prostate,anorectal,non_cancer,multiple_myeloma, lung,cervical,head_and_neck,melanoma,liver_bileduct,upper_gi, bladder_and_urothelial

SEQ ID NO: 476677 - DNA, 164 bp, Homo sapiens; identical to SEQ ID NO: 457345
  chr10:102587906-102588070
  hyper
  renal vs. breast,sarcoma,thyroid,colorectal, myeloid_neoplasm,prostate,anorectal,non_cancer,multiple_myeloma, lung,cervical,head_and_neck,melanoma,liver_bileduct,upper_gi, bladder_and_urothelial

SEQ ID NO: 476678 - DNA, 164 bp, Homo sapiens; identical to SEQ ID NO: 457345
  chr10:102587906-102588070
  hyper
  renal vs. breast,thyroid,myeloid_neoplasm,non_cancer, melanoma,sarcoma,prostate,colorectal,upper_gi, bladder_and_urothelial,lung,head_and_neck,anorectal

SEQ ID NO: 476679 - DNA, 78 bp, Homo sapiens; identical to SEQ ID NO: 457346
  chr10:102588175-102588253
  hyper
  renal vs. breast,thyroid,myeloid_neoplasm,non_cancer, melanoma,sarcoma,prostate,colorectal,upper_gi, bladder_and_urothelial,lung,head_and_neck,anorectal

SEQ ID NO: 476680 - DNA, 15 bp, Homo sapiens
  chr10:102588427-102588442
  hyper
  renal vs. breast,thyroid,myeloid_neoplasm,non_cancer, melanoma,sarcoma,prostate,colorectal,upper_gi, bladder_and_urothelial,lung,head_and_neck,anorectal
gttctgagctggcgt

SEQ ID NO: 476681 - DNA, 78 bp, Homo sapiens; identical to SEQ ID NO: 457346
  chr10:102588175-102588253
  hyper
  renal vs. myeloid_neoplasm,colorectal,thyroid,prostate, sarcoma,non_cancer,anorectal,upper_gi,bladder_and_urothelial, breast,uterine,lung

SEQ ID NO: 476682 - DNA, 15 bp, Homo sapiens
  chr10:102588427-102588442
  hyper
  renal vs. myeloid_neoplasm,colorectal,thyroid,prostate, sarcoma,non_cancer,anorectal,upper_gi,bladder_and_urothelial, breast,uterine,lung
gttctgagctggcgt

SEQ ID NO: 476683 - DNA, 161 bp, Homo sapiens
  chr10:102588941-102589102
  hyper
  renal vs. myeloid_neoplasm,colorectal,thyroid,prostate, sarcoma,non_cancer,anorectal,upper_gi,bladder_and_urothelial, breast,uterine,lung
ctgtaattccgtgttttcgctttttcctccctgcccctctctccctctgcccctctctcctctccgcttctctccccctctgtctctgtctctctccgtctctgtcgctcttgtctgtctgtctctgctctttcctcggcctctctccccagacctggccc

SEQ ID NO: 476684 - DNA, 161 bp, Homo sapiens; identical to SEQ ID NO: 476683
  chr10:102588941-102589102
  hyper
  renal vs. myeloid_neoplasm,non_cancer,colorectal,thyroid, multiple_myeloma,anorectal,prostate,cervical

SEQ ID NO: 476685 - DNA, 207 bp, Homo sapiens
  chr10:104001004-104001211
  hyper
  renal vs. sarcoma
ccaggtctcgttttagggattccaaggtccagcaatagctcctcggccccatgagcccctgtccttagaatggtcaaacactcacagtgcgtcctgcaacaggcagactcccagtagcggcggctgcggcggcgatctagagggcaggcaggggccaggggccgggcacccggccggagtgggggccgcccccctgctcccgggccg

SEQ ID NO: 476686 - DNA, 21 bp, Homo sapiens
  chr10:104001797-104001818
  hyper
  renal vs. sarcoma
ttctttctcctcagccgcttc

SEQ ID NO: 476687 - DNA, 579 bp, Homo sapiens
  chr10:105253250-105253829
  hyper
  renal vs. ovary,sarcoma,multiple_myeloma,anorectal, prostate,breast
cgcatccggggagctcggcgttctcgcggccctgctccccttgttttcaagtgcaagttccatgtttccgtgctgggaataaggccagccccgggtgccaccatactcgcctgatgtcttaccccgacccgcgccgccgagagcttgcggctacgggaacgcggcgcgccccggggccacatctggcctagcgggcgcgcgcgtgtcactaagacgctcattcaccggcgcagctgtcaccataacaaccggagcgagggaatcctggagactgccggggcggggggcgggggcggcggtcgcaggagggacccggcgcgggcgggaccgcggcggtcgggggacaccagctgcgtcggagcgcccagaacgccccgcgctccgccgagccccgctccacgcagacccgcgggcgggagggagccacgcacatcgccgccgcggccgtctccgcggggcggtaaccgagcctgcctcggagccgccgaacgcccacgccagcgaccctgactctatggccccgggggagcgcgccggagccgccgcgccgcccacccccagccggaaccctagcgtccc

SEQ ID NO: 476688 - DNA, 236 bp, Homo sapiens; identical to SEQ ID NO: 351099
  chr10:105253853-105254089
  hyper
  renal vs. ovary,sarcoma,multiple_myeloma,anorectal, prostate,breast

SEQ ID NO: 476689 - DNA, 226 bp, Homo sapiens
  chr10:105253603-105253829
  hyper
  renal vs. ovary
cgtcggagcgcccagaacgccccgcgctccgccgagccccgctccacgcagacccgcgggcgggagggagccacgcacatcgccgccgcggccgtctccgcggggcggtaaccgagcctgcctcggagccgccgaacgcccacgccagcgaccctgactctatggccccgggggagcgcgccggagccgccgcgccgcccacccccagccggaaccctagcgtccc

SEQ ID NO: 476690 - DNA, 574 bp, Homo sapiens; identical to SEQ ID NO: 359669
  chr10:105253853-105254427
  hyper
  renal vs. ovary

SEQ ID NO: 476691 - DNA, 240 bp, Homo sapiens; identical to SEQ ID NO: 454122
  chr10:118891774-118892014
  hyper
  renal vs. multiple_myeloma

SEQ ID NO: 476692 - DNA, 69 bp, Homo sapiens; identical to SEQ ID NO: 470975
  chr10:119494306-119494375
  hyper
  renal vs. myeloid_neoplasm

SEQ ID NO: 476693 - DNA, 158 bp, Homo sapiens; identical to SEQ ID NO: 462327
  chr11:2466019-2466177
  hyper
  renal vs. ovary,upper_gi

SEQ ID NO: 476694 - DNA, 251 bp, Homo sapiens; identical to SEQ ID NO: 462328
  chr11:2466191-2466442
  hyper
  renal vs. ovary,upper_gi

SEQ ID NO: 476695 - DNA, 16 bp, Homo sapiens
  chr11:2466831-2466847
  hyper
  renal vs. ovary,upper_gi
aaggaagtggggaaac

SEQ ID NO: 476696 - DNA, 129 bp, Homo sapiens; identical to SEQ ID NO: 351149
  chr11:8615887-8616016
  hyper
  renal vs. ovary

SEQ ID NO: 476697 - DNA, 805 bp, Homo sapiens; identical to SEQ ID NO: 334233
  chr11:33397688-33398493
  hyper
  renal vs. ovary

SEQ ID NO: 476698 - DNA, 324 bp, Homo sapiens; identical to SEQ ID NO: 372695
  chr11:33890633-33890957
  hyper
  renal vs. uterine

SEQ ID NO: 476699 - DNA, 251 bp, Homo sapiens; identical to SEQ ID NO: 457365
  chr11:33891709-33891960
  hyper
  renal vs. ovary

SEQ ID NO: 476700 - DNA, 119 bp, Homo sapiens; identical to SEQ ID NO: 347148
  chr11:33892127-33892246
  hyper
  renal vs. ovary

SEQ ID NO: 476701 - DNA, 2 bp, Homo sapiens
  chr11:46354343-46354345
  hyper
  renal vs. ovary
cg

SEQ ID NO: 476702 - DNA, 316 bp, Homo sapiens; identical to SEQ ID NO: 462351
  chr11:61276101-61276417
  hyper
  renal vs. thyroid,uterine,prostate,breast

SEQ ID NO: 476703 - DNA, 801 bp, Homo sapiens; identical to SEQ ID NO: 345395
  chr11:66079395-66080196
  hyper
  renal vs. upper_gi,pancreas_gallbladder,cervical,uterine, bladder_and_urothelial,colorectal,myeloid_neoplasm,thyroid, ovary,non_cancer,prostate,lung,head_and_neck

SEQ ID NO: 476704 - DNA, 796 bp, Homo sapiens; identical to SEQ ID NO: 455617
  chr11:66079700-66080496
  hyper
  renal vs. pancreas_gallbladder,upper_gi,colorectal,ovary, cervical,bladder_and_urothelial,melanoma,uterine,lung, non_cancer,anorectal,myeloid_neoplasm,prostate,thyroid

SEQ ID NO: 476705 - DNA, 103 bp, Homo sapiens; identical to SEQ ID NO: 359903
  chr11:75380110-75380213
  hyper
  renal vs. thyroid

SEQ ID NO: 476706 - DNA, 510 bp, Homo sapiens; identical to SEQ ID NO: 452797
  chr11:76381512-76382022
  hyper
  renal vs. multiple_myeloma

SEQ ID NO: 476707 - DNA, 30 bp, Homo sapiens; identical to SEQ ID NO: 452798
  chr11:76382264-76382294
  hyper
  renal vs. multiple_myeloma

SEQ ID NO: 476708 - DNA, 290 bp, Homo sapiens; identical to SEQ ID NO: 359907
  chr11:79150336-79150626
  hyper
  renal vs. ovary,head_and_neck

SEQ ID NO: 476709 - DNA, 88 bp, Homo sapiens
  chr11:119293218-119293306
  hyper
  renal vs. myeloid_neoplasm,thyroid,non_cancer, multiple_myeloma,anorectal,bladder_and_urothelial,prostate
cggcgggcctcatccttaatccatttccgtattccaatcctctcctttcccaaatgagtcccccttccccctctctcatccttttcca

SEQ ID NO: 476710 - DNA, 62 bp, Homo sapiens; identical to SEQ ID NO: 202750
  chr11:119294072-119294134
  hyper
  renal vs. myeloid_neoplasm,thyroid,non_cancer, multiple_myeloma,anorectal,bladder_and_urothelial,prostate

SEQ ID NO: 476711 - DNA, 542 bp, Homo sapiens; identical to SEQ ID NO: 454137
  chr12:1739048-1739590
  hyper
  renal vs. liver_bileduct

SEQ ID NO: 476712 - DNA, 57 bp, Homo sapiens; identical to SEQ ID NO: 372897
  chr12:1739775-1739832
  hyper
  renal vs. liver_bileduct

SEQ ID NO: 476713 - DNA, 86 bp, Homo sapiens; identical to SEQ ID NO: 452813
  chr12:4377809-4377895
  hyper
  renal vs. lymphoid_neoplasm

SEQ ID NO: 476714 - DNA, 142 bp, Homo sapiens; identical to SEQ ID NO: 452814
  chr12:4378558-4378700
  hyper
  renal vs. lymphoid_neoplasm

SEQ ID NO: 476715 - DNA, 88 bp, Homo sapiens; identical to SEQ ID NO: 454142
  chr12:4378715-4378803
  hyper
  renal vs. colorectal

SEQ ID NO: 476716 - DNA, 247 bp, Homo sapiens; identical to SEQ ID NO: 455641
  chr12:4379920-4380167
  hyper
  renal vs. colorectal,anorectal

SEQ ID NO: 476717 - DNA, 247 bp, Homo sapiens; identical to SEQ ID NO: 455641
  chr12:4379920-4380167
  hyper
  renal vs. colorectal,ovary

SEQ ID NO: 476718 - DNA, 285 bp, Homo sapiens; identical to SEQ ID NO: 455642
  chr12:4380196-4380481
  hyper
  renal vs. colorectal,ovary

SEQ ID NO: 476719 - DNA, 401 bp, Homo sapiens; identical to SEQ ID NO: 455645
  chr12:4381033-4381434
  hyper
  renal vs. ovary,colorectal

SEQ ID NO: 476720 - DNA, 155 bp, Homo sapiens; identical to SEQ ID NO: 345415
  chr12:4384059-4384214
  hyper
  renal vs. multiple_myeloma

SEQ ID NO: 476721 - DNA, 494 bp, Homo sapiens; identical to SEQ ID NO: 457433
  chr12:48576976-48577470
  hyper
  renal vs. sarcoma,ovary,anorectal,non_cancer, bladder_and_urothelial,myeloid_neoplasm,multiple_myeloma, thyroid,uterine,lung

SEQ ID NO: 476722 - DNA, 409 bp, Homo sapiens; identical to SEQ ID NO: 457434
  chr12:48577061-48577470
  hyper
  renal vs. sarcoma,anorectal,non_cancer,thyroid

SEQ ID NO: 476723 - DNA, 976 bp, Homo sapiens; identical to SEQ ID NO: 468713
  chr12:49739246-49740222
  hyper
  renal vs. ovary

SEQ ID NO: 476724 - DNA, 892 bp, Homo sapiens
  chr12:49739747-49740639
  hyper
  renal vs. ovary,head_and_neck,pancreas_gallbladder, uterine
cgcccacgcggggccagtttgcgggtaaatgcaccaccgcgccccgcaccacagctcagaccctttcctctcgctgcagtttgtcagatccccccacctcccactctgcaccagtttatagaacaacaatttggggaaaacaatccgggcggagtgacggccccgtaattgtgacaaagtgagtgcgggcggctggagagagcgctaggccgggagcgctgcagggcgaggcggaggcaggggcgcctccccccgccctgccgccccctcgttcttattccggtcacctcccatccctctccttgactcttcaattcctcttctcccggccccttgcgccttccttcgcttgttcctccatcgctcttccctttcctcccggtaacagctcttctcccgctcccccgaccccgtcgcccctcccccggtgcgctttttcctcgctcacttctcccctctcctctgccctccactcgtttcttcagcttttcctcgcgcttacattgcccttgggcccctggctctccccgcacaatccgcttctctccctccccactcctcccttcctgagatcgaaccctgagccccttcccgacccccactctctgggccgccagcgcagccccgcatttctgggttcctcgggaagtaaacctgggggcgcgctgcggccccgggtgccccggcggccagccccttccctctcccttgtatggctgccgcccccgccccaccacctgagccgggagatagtttgtttgtccagcggcggccgccgccgcccacgctgtttgcaaagcttagcgcgccgtcgcgcagtgcgggcccaattaagtctcattcattattcagcgctcctgtccgcccccgccccccagcagtctgaggcgtc

SEQ ID NO: 476725 - DNA, 419 bp, Homo sapiens; identical to SEQ ID NO: 334517
  chr12:49931623-49932042
  hyper
  renal vs. pancreas_gallbladder

SEQ ID NO: 476726 - DNA, 660 bp, Homo sapiens; identical to SEQ ID NO: 334522
  chr12:51785160-51785820
  hyper
  renal vs. upper_gi,ovary,pancreas_gallbladder,uterine, colorectal

SEQ ID NO: 476727 - DNA, 58 bp, Homo sapiens; identical to SEQ ID NO: 455665
  chr12:54144782-54144840
  hyper
  renal vs. ovary

SEQ ID NO: 476728 - DNA, 206 bp, Homo sapiens; identical to SEQ ID NO: 455669
  chr12:54422141-54422347
  hyper
  renal vs. uterine,prostate,myeloid_neoplasm, bladder_and_urothelial,thyroid,colorectal

SEQ ID NO: 476729 - DNA, 56 bp, Homo sapiens; identical to SEQ ID NO: 455670
  chr12:54422376-54422432
  hyper
  renal vs. uterine,prostate,myeloid_neoplasm, bladder_and_urothelial,thyroid,colorectal

SEQ ID NO: 476730 - DNA, 404 bp, Homo sapiens; identical to SEQ ID NO: 351372
  chr12:54422525-54422929
  hyper
  renal vs. uterine,prostate,myeloid_neoplasm, bladder_and_urothelial,thyroid,colorectal

SEQ ID NO: 476731 - DNA, 572 bp, Homo sapiens
  chr12:54426536-54427108
  hyper
  renal vs. pancreas_gallbladder
cgctgtgggcttgttgtcccggctacccccaattccaagaacctttttttttttttccctcccccttccctctttctctctctcactccctctcccccttggttgggctttgccaacatatcgagatgcttttcgccggcttccatcactaacctcccggaggtcatcaagccaaatttatgagtggccgctcgagtcacgtgactctatttaaggctcccttatttgggaagagcgcataggataaagaaagagatatctccacctataaattgtccactttggagaacaaaaaacccctcaacttcaaagagtcacaaatcacccttaatcaaaaagggtgcagaaatttttttgggccctccccgccatgagctcctacgtagccaattcattctataagcagagccccaatatccctgcctataacatgcaaacttgtgggaactatggatcggcctcagaggtgcaggcatccaggtactgctacggcggattggacttaagcatcactttcccaccgcctgcgccttccaactctctccacggggtagacatggctgccaaccccc

SEQ ID NO: 476732 - DNA, 24 bp, Homo sapiens
  chr12:54427307-54427331
  hyper
  renal vs. pancreas_gallbladder
accggccccgccacagatttaccc

SEQ ID NO: 476733 - DNA, 206 bp, Homo sapiens
  chr12:54426902-54427108
  hyper
  renal vs. ovary,uterine,anorectal,upper_gi, pancreas_gallbladder,cervical
cgccatgagctcctacgtagccaattcattctataagcagagccccaatatccctgcctataacatgcaaacttgtgggaactatggatcggcctcagaggtgcaggcatccaggtactgctacggcggattggacttaagcatcactttcccaccgcctgcgccttccaactctctccacggggtagacatggctgccaaccccc

SEQ ID NO: 476734 - DNA, 330 bp, Homo sapiens
  chr12:54427307-54427637
  hyper
  renal vs. ovary,uterine,anorectal,upper_gi, pancreas_gallbladder,cervical
accggccccgccacagatttacccgtggatgaccaaactgcacatgagccacggtaaactttaggacttcattttgcgctctcgggtccgcctgggttttataggccatgcggggcaaataaagaaaaaaaacctgcggccataaattttacgatccaggcatcaatggctcgtaaaactgtccactaaaaggcttagaggctgtgtgcgcccaaatttacgacgacataattggatcataggaacaaaacgtgtataaaaggcaatattcaatttttgggggagagggagggagttaaaaaaatagagggatctgaagggtgaggagcg

SEQ ID NO: 476735 - DNA, 279 bp, Homo sapiens
  chr12:54427358-54427637
  hyper
  renal vs. ovary,uterine,bladder_and_urothelial, myeloid_neoplasm,pancreas_gallbladder,upper_gi,melanoma, prostate,colorectal,sarcoma,breast,non_cancer,cervical,thyroid, multiple_myeloma,head_and_neck
cggtaaactttaggacttcattttgcgctctcgggtccgcctgggttttataggccatgcggggcaaataaagaaaaaaaacctgcggccataaattttacgatccaggcatcaatggctcgtaaaactgtccactaaaaggcttagaggctgtgtgcgcccaaatttacgacgacataattggatcataggaacaaaacgtgtataaaaggcaatattcaatttttgggggagagggagggagttaaaaaaatagagggatctgaagggtgaggagcg

SEQ ID NO: 476736 - DNA, 92 bp, Homo sapiens
  chr12:54427974-54428066
  hyper
  renal vs. ovary,uterine,bladder_and_urothelial, myeloid_neoplasm,pancreas_gallbladder,upper_gi,melanoma, prostate,colorectal,sarcoma,breast,non_cancer,cervical,thyroid, multiple_myeloma,head_and_neck
cgggtgggggcctgggctggggtggggacgggggaacgctgcaagctattcaccccttcctggcttggggtggggtttatgttccagagacg

SEQ ID NO: 476737 - DNA, 57 bp, Homo sapiens
  chr12:54428083-54428140
  hyper
  renal vs. ovary,uterine,bladder_and_urothelial, myeloid_neoplasm,pancreas_gallbladder,upper_gi,melanoma, prostate,colorectal,sarcoma,breast,non_cancer,cervical,thyroid, multiple_myeloma,head_and_neck
aaccagttacacgcgctaccagactctggaactcgagaaagaattccactttaaccg

SEQ ID NO: 476738 - DNA, 44 bp, Homo sapiens
  chr12:54428224-54428268
  hyper
  renal vs. ovary,uterine,bladder_and_urothelial, myeloid_neoplasm,pancreas_gallbladder,upper_gi,melanoma, prostate,colorectal,sarcoma,breast,non_cancer,cervical,thyroid, multiple_myeloma,head_and_neck
caggatgaagtggaagaaagattccaaaatgaaaagcaaagagg

SEQ ID NO: 476739 - DNA, 92 bp, Homo sapiens; identical to SEQ ID NO: 476736
  chr12:54427974-54428066
  hyper
  renal vs. uterine,ovary,pancreas_gallbladder, multiple_myeloma,prostate,melanoma,myeloid_neoplasm,non_cancer, upper_gi,thyroid,colorectal,head_and_neck, bladder_and_urothelial,breast,lung,cervical

SEQ ID NO: 476740 - DNA, 57 bp, Homo sapiens; identical to SEQ ID NO: 476737
  chr12:54428083-54428140
  hyper
  renal vs. uterine,ovary,pancreas_gallbladder, multiple_myeloma,prostate,melanoma,myeloid_neoplasm,non_cancer, upper_gi,thyroid,colorectal,head_and_neck, bladder_and_urothelial,breast,lung,cervical

SEQ ID NO: 476741 - DNA, 44 bp, Homo sapiens; identical to SEQ ID NO: 476738
  chr12:54428224-54428268
  hyper
  renal vs. uterine,ovary,pancreas_gallbladder, multiple_myeloma,prostate,melanoma,myeloid_neoplasm,non_cancer, upper_gi,thyroid,colorectal,head_and_neck, bladder_and_urothelial,breast,lung,cervical

SEQ ID NO: 476742 - DNA, 206 bp, Homo sapiens
  chr12:54446894-54447100
  hyper
  renal vs. myeloid_neoplasm
cgagacttctgaactctgcttttgccaaccacttcctgtctctcttcagcgggggctcaacccccagacctccagaaatgacgtcagaatcatttgcatcccgctgcctctacctgcctggtccagctgggaccctgcctcgccggccgcatggccagagggttgggtgagtgtgtatggggaagaggggctggactctggtatcc

SEQ ID NO: 476743 - DNA, 220 bp, Homo sapiens; identical to SEQ ID NO: 462397
  chr12:54447599-54447819
  hyper
  renal vs. myeloid_neoplasm

SEQ ID NO: 476744 - DNA, 30 bp, Homo sapiens; identical to SEQ ID NO: 455672
  chr12:54521011-54521041
  hyper
  renal vs. cervical,pancreas_gallbladder,myeloid_neoplasm

SEQ ID NO: 476745 - DNA, 3 bp, Homo sapiens
  chr12:66582719-66582722
  hyper
cgc

SEQ ID NO: 476746 - DNA, 86 bp, Homo sapiens; identical to SEQ ID NO: 360161
  chr12:81102562-81102648
  hyper
  renal vs. myeloid_neoplasm

SEQ ID NO: 476747 - DNA, 105 bp, Homo sapiens; identical to SEQ ID NO: 457456
  chr12:94541793-94541898
  hyper
  renal vs. multiple_myeloma,lymphoid_neoplasm,sarcoma, ovary,anorectal,myeloid_neoplasm

SEQ ID NO: 476748 - DNA, 758 bp, Homo sapiens; identical to SEQ ID NO: 457457
  chr12:94541957-94542715
  hyper
  renal vs. multiple_myeloma,lymphoid_neoplasm,sarcoma, ovary,anorectal,myeloid_neoplasm

SEQ ID NO: 476749 - DNA, 851 bp, Homo sapiens; identical to SEQ ID NO: 457458
  chr12:94542238-94543089
  hyper
  renal vs. ovary,multiple_myeloma,sarcoma,prostate, melanoma,non_cancer,myeloid_neoplasm,thyroid

SEQ ID NO: 476750 - DNA, 373 bp, Homo sapiens; identical to SEQ ID NO: 457459
  chr12:94542716-94543089
  hyper
  renal vs. thyroid,non_cancer

SEQ ID NO: 476751 - DNA, 31 bp, Homo sapiens; identical to SEQ ID NO: 452825
  chr12:94543992-94544023
  hyper
  renal vs. thyroid

SEQ ID NO: 476752 - DNA, 86 bp, Homo sapiens; identical to SEQ ID NO: 345430
  chr12:94544052-94544138
  hyper
  renal vs. thyroid

SEQ ID NO: 476753 - DNA, 647 bp, Homo sapiens
  chr12:99287504-99288151
  hyper
  renal vs. thyroid,bladder_and_urothelial,non_cancer, multiple_myeloma,uterine,myeloid_neoplasm,prostate
tcttctcaaactcacacctcagttgctcagagaggagaaatgcagcgaggactcgccttcctggccagtctctgaaaacgcgaaaccttcctgagctgtccatttgttttaggggctgtttataaacggctggttttcttggaggaaaaataaacaaataaatacggggcgatggcagcatcctgataaacacaggaccttgtttggcttttggcaagttgtaacctggagtaaaatcacatccaagttacaagcacgcaaattggaatttcgctggaaacactgacccgaccttcaccgaagcagcaaatcgcagtctctgctgctctgctcctgctctccaaggcttaacattggaaagtccatgcccacgtccccctctaattaatcaatgtagaaagaaatacgagggaagagagagggagcacactccacaccaaccttgccagcttctattcttcctgctattccttaaaggcgatgcacagcgcacctggaaattacgtggacttggcatggctttttaatattaaagacaaacgacctttggaaaatatacactgttaaagtcaaaccatttggagagacacccagcaatttacctcctcaaactcctcggaaccccaagaatgaggaaaggaaatgga

SEQ ID NO: 476754 - DNA, 391 bp, Homo sapiens; identical to SEQ ID NO: 466339
  chr12:99287760-99288151
  hyper
  renal vs. prostate,melanoma,ovary

SEQ ID NO: 476755 - DNA, 150 bp, Homo sapiens; identical to SEQ ID NO: 360180
  chr12:99289349-99289499
  hyper
  renal vs. prostate

SEQ ID NO: 476756 - DNA, 349 bp, Homo sapiens; identical to SEQ ID NO: 459395
  chr12:104851545-104851894
  hyper
  renal vs. melanoma,multiple_myeloma

SEQ ID NO: 476757 - DNA, 161 bp, Homo sapiens; identical to SEQ ID NO: 360215
  chr12:117316504-117316665
  hyper
  renal vs. uterine

SEQ ID NO: 476758 - DNA, 71 bp, Homo sapiens; identical to SEQ ID NO: 334669
  chr12:117316909-117316980
  hyper
  renal vs. ovary,pancreas_gallbladder,uterine

SEQ ID NO: 476759 - DNA, 32 bp, Homo sapiens
  chr12:117317225-117317257
  hyper
  renal vs. ovary,cervical,sarcoma
cgctttgggcttcgcgtctgtcgctcaacttc

SEQ ID NO: 476760 - DNA, 482 bp, Homo sapiens; identical to SEQ ID NO: 351423
  chr12:117317288-117317770
  hyper
  renal vs. ovary,cervical,sarcoma

SEQ ID NO: 476761 - DNA, 723 bp, Homo sapiens; identical to SEQ ID NO: 334679
  chr12:120524652-120525375
  hyper
  renal vs. lymphoid_neoplasm,lung,cervical,upper_gi, bladder_and_urothelial,anorectal,prostate

SEQ ID NO: 476762 - DNA, 89 bp, Homo sapiens; identical to SEQ ID NO: 462407
  chr12:122667648-122667737
  hyper
  renal vs. ovary,bladder_and_urothelial

SEQ ID NO: 476763 - DNA, 15 bp, Homo sapiens
  chr12:122667899-122667914
  hyper
  renal vs. ovary,bladder_and_urothelial
ccgggcgagcggagc

SEQ ID NO: 476764 - DNA, 246 bp, Homo sapiens; identical to SEQ ID NO: 351438
  chr12:132313659-132313905
  hyper
  renal vs. ovary

SEQ ID NO: 476765 - DNA, 168 bp, Homo sapiens; identical to SEQ ID NO: 462415
  chr13:20735265-20735433
  hyper
  renal vs. uterine

SEQ ID NO: 476766 - DNA, 178 bp, Homo sapiens; identical to SEQ ID NO: 468743
  chr13:33000891-33001069
  hyper
  renal vs. multiple_myeloma,anorectal,lymphoid_neoplasm

SEQ ID NO: 476767 - DNA, 204 bp, Homo sapiens; identical to SEQ ID NO: 351462
  chr13:33001228-33001432
  hyper
  renal vs. multiple_myeloma,anorectal,lymphoid_neoplasm

SEQ ID NO: 476768 - DNA, 480 bp, Homo sapiens; identical to SEQ ID NO: 468747
  chr13:42032017-42032497
  hyper
  renal vs. cervical,bladder_and_urothelial,lung

SEQ ID NO: 476769 - DNA, 109 bp, Homo sapiens; identical to SEQ ID NO: 347265
  chr13:42032649-42032758
  hyper
  renal vs. cervical,bladder_and_urothelial,lung

SEQ ID NO: 476770 - DNA, 280 bp, Homo sapiens; identical to SEQ ID NO: 464164
  chr13:50704210-50704490
  hyper
  renal vs. ovary

SEQ ID NO: 476771 - DNA, 248 bp, Homo sapiens; identical to SEQ ID NO: 464165
  chr13:50704800-50705048
  hyper
  renal vs. ovary

SEQ ID NO: 476772 - DNA, 26 bp, Homo sapiens
  chr13:50705099-50705125
  hyper
  renal vs. ovary
acaaatagactcaccatcaggcttgc

SEQ ID NO: 476773 - DNA, 110 bp, Homo sapiens; identical to SEQ ID NO: 360326
  chr13:96205363-96205473
  hyper
  renal vs. myeloid_neoplasm,non_cancer

SEQ ID NO: 476774 - DNA, 404 bp, Homo sapiens
  chr13:113622881-113623285
  hyper
  renal vs. upper_gi,bladder_and_urothelial,prostate, head_and_neck,breast,ovary,anorectal,lung,uterine, pancreas_gallbladder,cervical,colorectal,multiple_myeloma, liver_bileduct,thyroid,non_cancer,myeloid_neoplasm,melanoma,
  CONT. FROM ABOVE: sarcoma
cggccagccacggacccacgcatggacccagcgacccacggacctgcttacctgggcgcggcgcgggtggcatgcggccacacggaaggggcgcgctgggctgctgcggcctctgcagcttctacacctgccacggggcggccggaggtaaagggaggcggcggccaggcgcggccccgcggaggcagctgcactcgctcggtccactcgcggcttcgcggctgcccgcaaaccaggagggcgtggagacccggaaccggggggaagggcgggggcacttgtgcggcacccgcggggctcccaggggacctcggcggtgacacgaatttctaggtgaccttggcggtgacacgaatttctaggtgacctgtgtgatacactaggtgacctagtgacacaggtga

SEQ ID NO: 476775 - DNA, 311 bp, Homo sapiens
  chr13:113623348-113623659
  hyper
  renal vs. upper_gi,bladder_and_urothelial,prostate, head_and_neck,breast,ovary,anorectal,lung,uterine, pancreas_gallbladder,cervical,colorectal,multiple_myeloma, liver_bileduct,thyroid,non_cancer,myeloid_neoplasm,melanoma,
  CONT. FROM ABOVE: sarcoma
gggctccccgacgaccgcggcggtgacacgcggggctcccaggtgaccccggcggtgcactcacaggactcccaggtgacccgcggtggtgacacaccggggcgggcgcgcgccgcttccgcttccgccgagccgccccccgccccccgcggcgcagcgcgcgcccccctcccggtggcgcggaaccaatcctgggcagggaggcggcggctggaggctgaaagcgctgccgtggccccctccccgcctccgccgcgccccctccgcactcgcacggccccacccgcaggcgccccccgtgcggaggaagc

SEQ ID NO: 476776 - DNA, 93 bp, Homo sapiens
  chr13:113623192-113623285
  hyper
  renal vs. melanoma,liver_bileduct,anorectal, multiple_myeloma,bladder_and_urothelial,lung,head_and_neck, prostate,pancreas_gallbladder,ovary,uterine,non_cancer,breast, cervical,myeloid_neoplasm,upper_gi,colorectal,thyroid,sarcoma
cggcggtgacacgaatttctaggtgaccttggcggtgacacgaatttctaggtgacctgtgtgatacactaggtgacctagtgacacaggtga

SEQ ID NO: 476777 - DNA, 634 bp, Homo sapiens; identical to SEQ ID NO: 345452
  chr13:113623348-113623982
  hyper
  renal vs. melanoma,liver_bileduct,anorectal, multiple_myeloma,bladder_and_urothelial,lung,head_and_neck, prostate,pancreas_gallbladder,ovary,uterine,non_cancer,breast, cervical,myeloid_neoplasm,upper_gi,colorectal,thyroid,sarcoma

SEQ ID NO: 476778 - DNA, 77 bp, Homo sapiens; identical to SEQ ID NO: 462435
  chr14:24808635-24808712
  hyper
  renal vs. colorectal

SEQ ID NO: 476779 - DNA, 84 bp, Homo sapiens; identical to SEQ ID NO: 351525
  chr14:24808863-24808947
  hyper
  renal vs. colorectal

SEQ ID NO: 476780 - DNA, 164 bp, Homo sapiens
  chr14:36002437-36002601
  hyper
  renal vs. ovary,prostate,uterine,sarcoma,head_and_neck
cgccggcatttctcactcaatctactccatgctaaacaggccggttaggaattaagtcatactctgggtagtacaagtggaaagtgtgaacagagaaaccactttatgcgaggacagtggaaaatgagatcctcctttcctctccctactcctgctcctatcga

SEQ ID NO: 476781 - DNA, 270 bp, Homo sapiens; identical to SEQ ID NO: 347285
  chr14:36003004-36003274
  hyper
  renal vs. ovary,prostate,uterine,sarcoma,head_and_neck

SEQ ID NO: 476782 - DNA, 439 bp, Homo sapiens; identical to SEQ ID NO: 462437
  chr14:36003004-36003443
  hyper
  renal vs. sarcoma,ovary,prostate,anorectal

SEQ ID NO: 476783 - DNA, 260 bp, Homo sapiens; identical to SEQ ID NO: 334898
  chr14:52327346-52327606
  hyper
  renal vs. lymphoid_neoplasm,head_and_neck

SEQ ID NO: 476784 - DNA, 62 bp, Homo sapiens; identical to SEQ ID NO: 455696
  chr14:60794412-60794474
  hyper
  renal vs. uterine,multiple_myeloma, bladder_and_urothelial,ovary

SEQ ID NO: 476785 - DNA, 92 bp, Homo sapiens; identical to SEQ ID NO: 347308
  chr14:65016816-65016908
  hyper
  renal vs. bladder_and_urothelial,colorectal,cervical

SEQ ID NO: 476786 - DNA, 105 bp, Homo sapiens; identical to SEQ ID NO: 351584
  chr14:72399486-72399591
  hyper

SEQ ID NO: 476787 - DNA, 67 bp, Homo sapiens; identical to SEQ ID NO: 351600
  chr14:89818034-89818101
  hyper
  renal vs. prostate,myeloid_neoplasm

SEQ ID NO: 476788 - DNA, 5 bp, Homo sapiens
  chr14:90084014-90084019
  hyper
  renal vs. multiple_myeloma
cgtgt

SEQ ID NO: 476789 - DNA, 267 bp, Homo sapiens; identical to SEQ ID NO: 334997
  chr14:91755357-91755624
  hyper
  renal vs. pancreas_gallbladder

SEQ ID NO: 476790 - DNA, 73 bp, Homo sapiens
  chr14:102247600-102247673
  hyper
  renal vs. ovary
cgtatttcccgggaccctggcttctgtcctcagggaccccttcagaccttccccaccctccgaagcctcaacc

SEQ ID NO: 476791 - DNA, 50 bp, Homo sapiens; identical to SEQ ID NO: 360545
  chr14:102248214-102248264
  hyper
  renal vs. ovary

SEQ ID NO: 476792 - DNA, 78 bp, Homo sapiens; identical to SEQ ID NO: 345463
  chr14:105512395-105512473
  hyper
  renal vs. lymphoid_neoplasm

SEQ ID NO: 476793 - DNA, 13 bp, Homo sapiens
  chr15:34806433-34806446
  hyper
  renal vs. ovary
cgtgagccactgc

SEQ ID NO: 476794 - DNA, 235 bp, Homo sapiens
  chr15:34806641-34806876
  hyper
  renal vs. ovary
gccaacagcccccaagcttacgccacgcgaggagtcggagagacgcgccctcccctctcctcccacccaagcctccggcagtcccgggccggggctgggccagttgcgggagaaaggggcggggaactggggcctctctggggaaggctcccctttgtcctgggactccgggcgccccctctctgccctcgccctgccccgcgaggccgccgccgggcgcctcacagtcatgttg

SEQ ID NO: 476795 - DNA, 6 bp, Homo sapiens
  chr15:41805862-41805868
  hyper
  renal vs. sarcoma
acccgc

SEQ ID NO: 476796 - DNA, 205 bp, Homo sapiens; identical to SEQ ID NO: 455707
  chr15:41805870-41806075
  hyper
  renal vs. sarcoma

SEQ ID NO: 476797 - DNA, 135 bp, Homo sapiens; identical to SEQ ID NO: 345469
  chr15:41953174-41953309
  hyper
  renal vs. cervical,ovary,thyroid,non_cancer,uterine

SEQ ID NO: 476798 - DNA, 247 bp, Homo sapiens; identical to SEQ ID NO: 291013
  chr15:75248843-75249090
  hyper
  renal vs. anorectal

SEQ ID NO: 476799 - DNA, 139 bp, Homo sapiens; identical to SEQ ID NO: 468811
  chr15:75470758-75470897
  hyper
  renal vs. anorectal,multiple_myeloma

SEQ ID NO: 476800 - DNA, 494 bp, Homo sapiens; identical to SEQ ID NO: 468817
  chr15:89437837-89438331
  hyper
  renal vs. cervical,anorectal

SEQ ID NO: 476801 - DNA, 128 bp, Homo sapiens; identical to SEQ ID NO: 468818
  chr15:89438421-89438549
  hyper
  renal vs. cervical,anorectal

SEQ ID NO: 476802 - DNA, 110 bp, Homo sapiens; identical to SEQ ID NO: 462489
  chr15:91427360-91427470
  hyper
  renal vs. multiple_myeloma,uterine,pancreas_gallbladder, cervical,anorectal,bladder_and_urothelial,myeloid_neoplasm, thyroid

SEQ ID NO: 476803 - DNA, 77 bp, Homo sapiens; identical to SEQ ID NO: 351744
  chr15:91427979-91428056
  hyper
  renal vs. multiple_myeloma,uterine,pancreas_gallbladder, cervical,anorectal,bladder_and_urothelial,myeloid_neoplasm, thyroid

SEQ ID NO: 476804 - DNA, 17 bp, Homo sapiens
  chr15:91643799-91643816
  hyper
  renal vs. ovary
tgcgcttctttgaaagc

SEQ ID NO: 476805 - DNA, 1 bp, Homo sapiens
  chr16:1030271-1030272
  hyper
  renal vs. ovary
c

SEQ ID NO: 476806 - DNA, 48 bp, Homo sapiens; identical to SEQ ID NO: 345484
  chr16:2042503-2042551
  hyper
  renal vs. anorectal,myeloid_neoplasm,thyroid,non_cancer

SEQ ID NO: 476807 - DNA, 184 bp, Homo sapiens; identical to SEQ ID NO: 360800
  chr16:23193716-23193900
  hyper
  renal vs. head_and_neck

SEQ ID NO: 476808 - DNA, 10 bp, Homo sapiens
  chr16:23846783-23846793
  hyper
  renal vs. non_cancer,myeloid_neoplasm,thyroid, multiple_myeloma,melanoma
cgctcctccc

SEQ ID NO: 476809 - DNA, 8 bp, Homo sapiens
  chr16:68504020-68504028
  hyper
  renal vs. prostate,anorectal,myeloid_neoplasm, multiple_myeloma,non_cancer,bladder_and_urothelial,melanoma, breast,lymphoid_neoplasm,head_and_neck,cervical,colorectal, uterine,upper_gi
cgttctgt

SEQ ID NO: 476810 - DNA, 102 bp, Homo sapiens; identical to SEQ ID NO: 345496
  chr16:68504292-68504394
  hyper
  renal vs. prostate,anorectal,myeloid_neoplasm, multiple_myeloma,non_cancer,bladder_and_urothelial,melanoma, breast,lymphoid_neoplasm,head_and_neck,cervical,colorectal, uterine,upper_gi

SEQ ID NO: 476811 - DNA, 179 bp, Homo sapiens
  chr16:68679166-68679345
  hyper
  renal vs. lung
cgctcacctggcctcctcccgctggctcccgggggctgcggtgctcaaaggggcaagagctgagcggaacaccggcccgccgtcgcggcagctgcttcacccctctctctgcagccatggggctccctcgtggacctctcgcgtctctcctccttctccaggtactccacagcctcgcc

SEQ ID NO: 476812 - DNA, 598 bp, Homo sapiens
  chr16:68679362-68679960
  hyper
  renal vs. lung
cgctccctggggggcgggcggggtccgcatggggcagtggcgtcggggagagcgcggggctgcgctccctggggccaagggagtcccggaaggcccgtgaggaccctgcggtgtggggagtgcagggccgggcacgcctggacccagcctccttcactctctgccctcgggcgcaggtttgctggctgcagtgcgcggcctccgagccgtgccgggcggtcttcagggaggctgaagtgaccttggaggcgggaggcgcggagcaggagcccggccaggcgctggggaaaggtaagatcctcagggtggaaccgcagggtaggggccgcacgtgaccattttggtgtggaccgcgcgaggggtgttcgggccggggcaagggactcctggcgccacctcagttcccggggaggcgcagaacgcgcctcgggggctgggattgggggtggtggctgacggagaaggctgggcagcagagcgcctatgacatccagccccttgtccggtagccactgcttaccttgaccccctcctccgagatgccggatggctgagcccctcacccagtctcgacgtgggaagttctcccccgctggcc

SEQ ID NO: 476813 - DNA, 174 bp, Homo sapiens; identical to SEQ ID NO: 335377
  chr16:74659437-74659611
  hyper
  renal vs. lung,lymphoid_neoplasm,liver_bileduct, bladder_and_urothelial,pancreas_gallbladder,breast,uterine, prostate,head_and_neck,colorectal,ovary,cervical,sarcoma, melanoma,upper_gi,anorectal,non_cancer,thyroid

SEQ ID NO: 476814 - DNA, 205 bp, Homo sapiens; identical to SEQ ID NO: 457590
  chr16:77247511-77247716
  hyper
  renal vs. multiple_myeloma,lymphoid_neoplasm,uterine, prostate

SEQ ID NO: 476815 - DNA, 315 bp, Homo sapiens; identical to SEQ ID NO: 335387
  chr16:78322882-78323197
  hyper
  renal vs. anorectal

SEQ ID NO: 476816 - DNA, 400 bp, Homo sapiens; identical to SEQ ID NO: 462524
  chr16:89006909-89007309
  hyper
  renal vs. uterine

SEQ ID NO: 476817 - DNA, 84 bp, Homo sapiens; identical to SEQ ID NO: 462525
  chr16:89007225-89007309
  hyper
  renal vs. melanoma,thyroid,breast

SEQ ID NO: 476818 - DNA, 92 bp, Homo sapiens; identical to SEQ ID NO: 462526
  chr16:89007789-89007881
  hyper
  renal vs. melanoma,thyroid,breast

SEQ ID NO: 476819 - DNA, 211 bp, Homo sapiens; identical to SEQ ID NO: 347401
  chr16:89007995-89008206
  hyper
  renal vs. melanoma,thyroid,breast

SEQ ID NO: 476820 - DNA, 92 bp, Homo sapiens; identical to SEQ ID NO: 462526
  chr16:89007789-89007881
  hyper
  renal vs. multiple_myeloma,melanoma,breast,sarcoma

SEQ ID NO: 476821 - DNA, 374 bp, Homo sapiens; identical to SEQ ID NO: 462529
  chr16:89007995-89008369
  hyper
  renal vs. multiple_myeloma,melanoma,breast,sarcoma

SEQ ID NO: 476822 - DNA, 7 bp, Homo sapiens
  chr16:89008592-89008599
  hyper
  renal vs. multiple_myeloma,melanoma,breast,sarcoma
cccgccc

SEQ ID NO: 476823 - DNA, 99 bp, Homo sapiens; identical to SEQ ID NO: 455749
  chr16:89641257-89641356
  hyper
  renal vs. cervical,sarcoma,multiple_myeloma,ovary, myeloid_neoplasm,lung,thyroid,non_cancer,anorectal,uterine

SEQ ID NO: 476824 - DNA, 5 bp, Homo sapiens
  chr16:89641413-89641418
  hyper
  renal vs. cervical,sarcoma,multiple_myeloma,ovary, myeloid_neoplasm,lung,thyroid,non_cancer,anorectal,uterine
cgtgg

SEQ ID NO: 476825 - DNA, 123 bp, Homo sapiens; identical to SEQ ID NO: 351864
  chr16:89641704-89641827
  hyper
  renal vs. cervical,sarcoma,multiple_myeloma,ovary, myeloid_neoplasm,lung,thyroid,non_cancer,anorectal,uterine

SEQ ID NO: 476826 - DNA, 122 bp, Homo sapiens; identical to SEQ ID NO: 457600
  chr17:3599052-3599174
  hyper
  renal vs. ovary,bladder_and_urothelial

SEQ ID NO: 476827 - DNA, 392 bp, Homo sapiens; identical to SEQ ID NO: 457601
  chr17:3599244-3599636
  hyper
  renal vs. ovary,bladder_and_urothelial

SEQ ID NO: 476828 - DNA, 459 bp, Homo sapiens; identical to SEQ ID NO: 351870
  chr17:3867210-3867669
  hyper
  renal vs. multiple_myeloma,myeloid_neoplasm,non_cancer

SEQ ID NO: 476829 - DNA, 201 bp, Homo sapiens; identical to SEQ ID NO: 335438
  chr17:3867893-3868094
  hyper
  renal vs. ovary

SEQ ID NO: 476830 - DNA, 27 bp, Homo sapiens
  chr17:16256915-16256942
  hyper
  renal vs. uterine,colorectal
cggcccgcccggccgctgggacgcacc

SEQ ID NO: 476831 - DNA, 109 bp, Homo sapiens; identical to SEQ ID NO: 360970
  chr17:16257038-16257147
  hyper
  renal vs. uterine,colorectal

SEQ ID NO: 476832 - DNA, 960 bp, Homo sapiens; identical to SEQ ID NO: 454229
  chr17:17685627-17686587
  hyper
  renal vs. ovary,uterine,pancreas_gallbladder

SEQ ID NO: 476833 - DNA, 911 bp, Homo sapiens; identical to SEQ ID NO: 454230
  chr17:17686099-17687010
  hyper
  renal vs. ovary,uterine,multiple_myeloma, pancreas_gallbladder,cervical,anorectal,non_cancer

SEQ ID NO: 476834 - DNA, 14 bp, Homo sapiens
  chr17:17687055-17687069
  hyper
  renal vs. ovary,uterine,multiple_myeloma, pancreas_gallbladder,cervical,anorectal,non_cancer
cccccctccacctc

SEQ ID NO: 476835 - DNA, 413 bp, Homo sapiens; identical to SEQ ID NO: 454232
  chr17:17686597-17687010
  hyper
  renal vs. ovary,uterine,multiple_myeloma, pancreas_gallbladder,cervical,anorectal,myeloid_neoplasm, non_cancer,prostate,head_and_neck,breast

SEQ ID NO: 476836 - DNA, 367 bp, Homo sapiens; identical to SEQ ID NO: 345511
  chr17:17687055-17687422
  hyper
  renal vs. ovary,uterine,multiple_myeloma, pancreas_gallbladder,cervical,anorectal,myeloid_neoplasm, non_cancer,prostate,head_and_neck,breast

SEQ ID NO: 476837 - DNA, 811 bp, Homo sapiens; identical to SEQ ID NO: 335480
  chr17:18907431-18908242
  hyper
  renal vs. liver_bileduct,colorectal,lung,upper_gi, pancreas_gallbladder,ovary,uterine,breast,lymphoid_neoplasm, anorectal,head_and_neck,multiple_myeloma,cervical,non_cancer, thyroid,bladder_and_urothelial,prostate

SEQ ID NO: 476838 - DNA, 356 bp, Homo sapiens; identical to SEQ ID NO: 455755
  chr17:27038294-27038650
  hyper
  renal vs. cervical,anorectal,non_cancer,myeloid_neoplasm, multiple_myeloma

SEQ ID NO: 476839 - DNA, 4 bp, Homo sapiens
  chr17:27949429-27949433
  hyper
  renal vs. ovary
cgtg

SEQ ID NO: 476840 - DNA, 122 bp, Homo sapiens; identical to SEQ ID NO: 351920
  chr17:35078956-35079078
  hyper
  renal vs. multiple_myeloma

SEQ ID NO: 476841 - DNA, 115 bp, Homo sapiens
  chr17:35290220-35290335
  hyper
  renal vs. anorectal
cggacaagcctcctaacttgggcctcctggccgggaaagtggagatagtacccttctcttccaccccccaccaccctcttgctatacggttcaggggagaccgtgatacaagctg

SEQ ID NO: 476842 - DNA, 100 bp, Homo sapiens
  chr17:35291109-35291209
  hyper
  renal vs. anorectal
aatgtacaggtcctgggcggtgtaagtggctgtgggtctgtggaggacattgggtaggaaaacgcttgcgtagttgaggatgcagacaataaatgtggcc

SEQ ID NO: 476843 - DNA, 160 bp, Homo sapiens; identical to SEQ ID NO: 468860
  chr17:36829818-36829978
  hyper
  renal vs. ovary

SEQ ID NO: 476844 - DNA, 303 bp, Homo sapiens; identical to SEQ ID NO: 351928
  chr17:36830051-36830354
  hyper
  renal vs. ovary

SEQ ID NO: 476845 - DNA, 21 bp, Homo sapiens
  chr17:37761159-37761180
  hyper
  renal vs. thyroid
cgcaaaacgcggagactggag

SEQ ID NO: 476846 - DNA, 37 bp, Homo sapiens; identical to SEQ ID NO: 455770
  chr17:40332770-40332807
  hyper
  renal vs. bladder_and_urothelial

SEQ ID NO: 476847 - DNA, 176 bp, Homo sapiens
  chr17:41790849-41791025
  hyper
  renal vs. ovary,uterine
cgcaatttgtcaccaggggttttgactttccttattgcctcgtgggaggtggcagaggcagcacatctcagaccgagcctcggttcctccccctacctcccaccgctgcgcttgaagaaagatgctgcagcctccccagtccccatgccagcgctcccacttttctctgagctttc

SEQ ID NO: 476848 - DNA, 260 bp, Homo sapiens
  chr17:41791085-41791345
  hyper
  renal vs. ovary,uterine
cggtcaaatgaaaaaataccagctccgcccccacgcgggctggccggggcgcctggagcgccagggcggctgcagcgcgctctccgcggccgtcggccctgagctcatttcctggggcgcgcgcgccgggctatttcagcctggcgctgtgcaaacaggacaatttactgcggccaaaagggacccaaattacaatcgtatcacagacaaatatccgccacgccaggtctccaggggccaggaggggcctctctcccggc

SEQ ID NO: 476849 - DNA, 40 bp, Homo sapiens
  chr17:41791412-41791452
  hyper
  renal vs. ovary,uterine
cgtttgccaccgagctgtgcctgctctctgcaacaggaag

SEQ ID NO: 476850 - DNA, 405 bp, Homo sapiens; identical to SEQ ID NO: 455771
  chr17:41984572-41984977
  hyper
  renal vs. ovary

SEQ ID NO: 476851 - DNA, 265 bp, Homo sapiens; identical to SEQ ID NO: 361039
  chr17:41985015-41985280
  hyper
  renal vs. ovary

SEQ ID NO: 476852 - DNA, 39 bp, Homo sapiens
  chr17:45055681-45055720
  hyper
  renal vs. ovary
cgcgagcgaccgcagtcccaaattgcatctccataccca

SEQ ID NO: 476853 - DNA, 270 bp, Homo sapiens
  chr17:45056305-45056575
  hyper
  renal vs. ovary
gccccggcgccgccgcccacgccgtccacctcctccaagccgctgtggttcaggaaggtcgcgttcatcgccgcgcggcgccgggggtctcggcgcgcagtcccgggtgcactgggctgctcgccggggtccgcgctctcagggacgctccggacccctcggaccggctcctgcggtacggggaggggacgaaggcgggaggctggctgcctgcgcgctctcgggccgcctacccctgggcaccgggcgggaagcgaccgcccggaggag

SEQ ID NO: 476854 - DNA, 29 bp, Homo sapiens
  chr17:46089217-46089246
  hyper
  renal vs. bladder_and_urothelial,anorectal,prostate, colorectal,non_cancer,myeloid_neoplasm,thyroid,ovary
cgtttcctgggccattcctctccaggcag

SEQ ID NO: 476855 - DNA, 299 bp, Homo sapiens; identical to SEQ ID NO: 468873
  chr17:46089283-46089582
  hyper
  renal vs. bladder_and_urothelial,anorectal,prostate, colorectal,non_cancer,myeloid_neoplasm,thyroid,ovary

SEQ ID NO: 476856 - DNA, 349 bp, Homo sapiens; identical to SEQ ID NO: 455782
  chr17:46806440-46806789
  hyper
  renal vs. multiple_myeloma

SEQ ID NO: 476857 - DNA, 325 bp, Homo sapiens; identical to SEQ ID NO: 455784
  chr17:46829655-46829980
  hyper
  renal vs. multiple_myeloma,anorectal,non_cancer, myeloid_neoplasm,thyroid

SEQ ID NO: 476858 - DNA, 106 bp, Homo sapiens; identical to SEQ ID NO: 455785
  chr17:46829874-46829980
  hyper
  renal vs. multiple_myeloma,anorectal,non_cancer, myeloid_neoplasm,thyroid

SEQ ID NO: 476859 - DNA, 45 bp, Homo sapiens; identical to SEQ ID NO: 351976
  chr17:46830655-46830700
  hyper
  renal vs. multiple_myeloma,anorectal,non_cancer, myeloid_neoplasm,thyroid

SEQ ID NO: 476860 - DNA, 132 bp, Homo sapiens; identical to SEQ ID NO: 455788
  chr17:46831595-46831727
  hyper
  renal vs. multiple_myeloma

SEQ ID NO: 476861 - DNA, 267 bp, Homo sapiens; identical to SEQ ID NO: 374206
  chr17:49008887-49009154
  hyper
  renal vs. pancreas_gallbladder

SEQ ID NO: 476862 - DNA, 528 bp, Homo sapiens; identical to SEQ ID NO: 351984
  chr17:49021815-49022343
  hyper
  renal vs. liver_bileduct

SEQ ID NO: 476863 - DNA, 62 bp, Homo sapiens
  chr17:54756198-54756260
  hyper
  renal vs. ovary,multiple_myeloma
gggggccccctccctcccccggctcccctcccccctcctccccgaaatttgcagacatctgc

SEQ ID NO: 476864 - DNA, 298 bp, Homo sapiens; identical to SEQ ID NO: 468876
  chr17:54911482-54911780
  hyper
  renal vs. multiple_myeloma,ovary,cervical,colorectal, upper_gi,anorectal

SEQ ID NO: 476865 - DNA, 515 bp, Homo sapiens; identical to SEQ ID NO: 345534
  chr17:54911874-54912389
  hyper
  renal vs. multiple_myeloma,ovary,cervical,colorectal, upper_gi,anorectal

SEQ ID NO: 476866 - DNA, 112 bp, Homo sapiens; identical to SEQ ID NO: 454237
  chr17:61777761-61777873
  hyper
  renal vs. multiple_myeloma

SEQ ID NO: 476867 - DNA, 76 bp, Homo sapiens; identical to SEQ ID NO: 345537
  chr17:61778423-61778499
  hyper
  renal vs. multiple_myeloma

SEQ ID NO: 476868 - DNA, 61 bp, Homo sapiens; identical to SEQ ID NO: 466630
  chr17:64961305-64961366
  hyper
  renal vs. ovary

SEQ ID NO: 476869 - DNA, 203 bp, Homo sapiens; identical to SEQ ID NO: 466633
  chr17:64961625-64961828
  hyper
  renal vs. ovary

SEQ ID NO: 476870 - DNA, 83 bp, Homo sapiens; identical to SEQ ID NO: 347465
  chr17:64962141-64962224
  hyper
  renal vs. ovary

SEQ ID NO: 476871 - DNA, 46 bp, Homo sapiens
  chr17:71897934-71897980
  hyper
  renal vs. uterine,bladder_and_urothelial,cervical, sarcoma,anorectal,myeloid_neoplasm,non_cancer,multiple_myeloma, prostate,colorectal
cgagtggagggaatgaggagggcctttcaagggaggcgggattgca

SEQ ID NO: 476872 - DNA, 93 bp, Homo sapiens; identical to SEQ ID NO: 352024
  chr17:75447727-75447820
  hyper
  renal vs. melanoma,anorectal,sarcoma,breast,cervical, head_and_neck,prostate,uterine,upper_gi,pancreas_gallbladder

SEQ ID NO: 476873 - DNA, 40 bp, Homo sapiens; identical to SEQ ID NO: 464310
  chr17:76254688-76254728
  hyper
  renal vs. myeloid_neoplasm,thyroid

SEQ ID NO: 476874 - DNA, 62 bp, Homo sapiens; identical to SEQ ID NO: 361154
  chr17:76254854-76254916
  hyper
  renal vs. myeloid_neoplasm,thyroid

SEQ ID NO: 476875 - DNA, 238 bp, Homo sapiens; identical to SEQ ID NO: 345538
  chr18:2848166-2848404
  hyper
  renal vs. uterine,myeloid_neoplasm,thyroid,prostate

SEQ ID NO: 476876 - DNA, 122 bp, Homo sapiens; identical to SEQ ID NO: 462589
  chr18:24130266-24130388
  hyper
  renal vs. anorectal

SEQ ID NO: 476877 - DNA, 3 bp, Homo sapiens
  chr19:267137-267140
  hyper
cgc

SEQ ID NO: 476878 - DNA, 331 bp, Homo sapiens; identical to SEQ ID NO: 462598
  chr19:267237-267568
  hyper

SEQ ID NO: 476879 - DNA, 2 bp, Homo sapiens
  chr19:267657-267659
  hyper
ac

SEQ ID NO: 476880 - DNA, 743 bp, Homo sapiens; identical to SEQ ID NO: 335871
  chr19:941824-942567
  hyper
  renal vs. lymphoid_neoplasm,liver_bileduct,prostate, colorectal,myeloid_neoplasm,lung,anorectal,thyroid,non_cancer, breast,sarcoma,uterine,pancreas_gallbladder, bladder_and_urothelial

SEQ ID NO: 476881 - DNA, 108 bp, Homo sapiens
  chr19:1455104-1455212
  hyper
  renal vs. pancreas_gallbladder,multiple_myeloma, colorectal
cggcgccgccctctgagcccgcccccgctgacttgctccccaggtgtttcctgctgaatgagattgagaaggaggagaaggagaagctctggtactactctcagctgc

SEQ ID NO: 476882 - DNA, 33 bp, Homo sapiens; identical to SEQ ID NO: 361387
  chr19:4304684-4304717
  hyper
  renal vs. bladder_and_urothelial,ovary,myeloid_neoplasm, thyroid

SEQ ID NO: 476883 - DNA, 439 bp, Homo sapiens; identical to SEQ ID NO: 475529
  chr19:5608081-5608520
  hyper
  renal vs. melanoma,sarcoma,thyroid,lymphoid_neoplasm, cervical,head_and_neck,anorectal,non_cancer,breast

SEQ ID NO: 476884 - DNA, 405 bp, Homo sapiens; identical to SEQ ID NO: 335933
  chr19:9545915-9546320
  hyper
  renal vs. ovary

SEQ ID NO: 476885 - DNA, 169 bp, Homo sapiens; identical to SEQ ID NO: 335936
  chr19:10207022-10207191
  hyper
  renal vs. ovary,bladder_and_urothelial,head_and_neck, breast,melanoma,cervical,sarcoma,prostate,anorectal,uterine, thyroid,lung,non_cancer,upper_gi,colorectal

SEQ ID NO: 476886 - DNA, 7 bp, Homo sapiens
  chr19:10402604-10402611
  hyper
  renal vs. sarcoma,melanoma,thyroid
cccctcc

SEQ ID NO: 476887 - DNA, 177 bp, Homo sapiens; identical to SEQ ID NO: 335952
  chr19:11199850-11200027
  hyper
  renal vs. liver_bileduct,pancreas_gallbladder,upper_gi

SEQ ID NO: 476888 - DNA, 285 bp, Homo sapiens; identical to SEQ ID NO: 462610
  chr19:11532739-11533024
  hyper
  renal vs. bladder_and_urothelial

SEQ ID NO: 476889 - DNA, 10 bp, Homo sapiens
  chr19:11533632-11533642
  hyper
  renal vs. bladder_and_urothelial
ctgagctggc

SEQ ID NO: 476890 - DNA, 58 bp, Homo sapiens; identical to SEQ ID NO: 475536
  chr19:11689628-11689686
  hyper
  renal vs. multiple_myeloma

SEQ ID NO: 476891 - DNA, 1 bp, Homo sapiens
  chr19:12995814-12995815
  hyper
  renal vs. anorectal,breast,myeloid_neoplasm,non_cancer, thyroid
c

SEQ ID NO: 476892 - DNA, 221 bp, Homo sapiens; identical to SEQ ID NO: 454280
  chr19:12995851-12996072
  hyper
  renal vs. anorectal,breast,myeloid_neoplasm,non_cancer, thyroid

SEQ ID NO: 476893 - DNA, 190 bp, Homo sapiens; identical to SEQ ID NO: 455820
  chr19:13213427-13213617
  hyper
  renal vs. bladder_and_urothelial,cervical, pancreas_gallbladder,upper_gi,myeloid_neoplasm,thyroid, non_cancer,prostate,colorectal,multiple_myeloma,melanoma,lung, head_and_neck

SEQ ID NO: 476894 - DNA, 112 bp, Homo sapiens; identical to SEQ ID NO: 345573
  chr19:13213834-13213946
  hyper
  renal vs. bladder_and_urothelial,cervical, pancreas_gallbladder,upper_gi,myeloid_neoplasm,thyroid, non_cancer,prostate,colorectal,multiple_myeloma,melanoma,lung, head_and_neck

SEQ ID NO: 476895 - DNA, 240 bp, Homo sapiens; identical to SEQ ID NO: 462619
  chr19:17716539-17716779
  hyper
  renal vs. uterine,myeloid_neoplasm

SEQ ID NO: 476896 - DNA, 6 bp, Homo sapiens
  chr19:17717524-17717530
  hyper
  renal vs. uterine,myeloid_neoplasm,thyroid,non_cancer
ccgcac

SEQ ID NO: 476897 - DNA, 106 bp, Homo sapiens; identical to SEQ ID NO: 336015
  chr19:18059933-18060039
  hyper
  renal vs. ovary,bladder_and_urothelial,anorectal

SEQ ID NO: 476898 - DNA, 264 bp, Homo sapiens
  chr19:18722000-18722264
  hyper
  renal vs. ovary
cgttttaagcaatgcccaaaggtcacctcccatcattggcagggctctgccggcttttctttgcttctctccctgtcacctggacagaaccactttgcagtctgagcatcagtttcctcacccatataaaagggcaacgctaccggtacctgtcttatacggttgttgcaagaaaaagtgtttcgttggaatgaatgaaagacagtaattgtggaggggttaggcgcgcgcgggcctctggaattagcatgtgtgggcttgaat

SEQ ID NO: 476899 - DNA, 65 bp, Homo sapiens
  chr19:18722425-18722490
  hyper
  renal vs. ovary
ggaggccctcgccgccgggtcgcagcggcctagcatgggaggggaggggaggggcggggcggggc

SEQ ID NO: 476900 - DNA, 155 bp, Homo sapiens
  chr19:18722521-18722676
  hyper
  renal vs. ovary
cggggtccgccaggcacagccgcgcctgattaagccacgtgggggccggccgggggccgctgagatgaaagcgcggccgcaggccagagtagggggtgcgccgggcccccacccgggacaccctcttcccaggccgaaacctgagccgccctcta

SEQ ID NO: 476901 - DNA, 188 bp, Homo sapiens; identical to SEQ ID NO: 374677
  chr19:18722768-18722956
  hyper
  renal vs. ovary

SEQ ID NO: 476902 - DNA, 68 bp, Homo sapiens; identical to SEQ ID NO: 347581
  chr19:23598868-23598936
  hyper
  renal vs. ovary

SEQ ID NO: 476903 - DNA, 299 bp, Homo sapiens; identical to SEQ ID NO: 466814
  chr19:33791861-33792160
  hyper
  renal vs. pancreas_gallbladder

SEQ ID NO: 476904 - DNA, 197 bp, Homo sapiens; identical to SEQ ID NO: 466815
  chr19:33792630-33792827
  hyper
  renal vs. pancreas_gallbladder

SEQ ID NO: 476905 - DNA, 557 bp, Homo sapiens; identical to SEQ ID NO: 475550
  chr19:34310910-34311467
  hyper
  renal vs. head_and_neck

SEQ ID NO: 476906 - DNA, 66 bp, Homo sapiens; identical to SEQ ID NO: 352283
  chr19:34311498-34311564
  hyper
  renal vs. head_and_neck

SEQ ID NO: 476907 - DNA, 130 bp, Homo sapiens
  chr19:36347680-36347810
  hyper
  renal vs. multiple_myeloma
cgggggatcccgccctgcgtcccccattcatccgcgtctcagccgcgggagtttctcaacgggaagagggcggagctcccggggggcggacccgggcggggcgagcgggatcgggccctcttggggtctc

SEQ ID NO: 476908 - DNA, 35 bp, Homo sapiens; identical to SEQ ID NO: 361551
  chr19:36348065-36348100
  hyper
  renal vs. multiple_myeloma

SEQ ID NO: 476909 - DNA, 21 bp, Homo sapiens
  chr19:36478129-36478150
  hyper
  renal vs. ovary
cgttcgcgctgagctgcgcgc

SEQ ID NO: 476910 - DNA, 63 bp, Homo sapiens; identical to SEQ ID NO: 352285
  chr19:36478303-36478366
  hyper
  renal vs. ovary

SEQ ID NO: 476911 - DNA, 86 bp, Homo sapiens; identical to SEQ ID NO: 457749
  chr19:38719834-38719920
  hyper
  renal vs. ovary,sarcoma,prostate,anorectal

SEQ ID NO: 476912 - DNA, 264 bp, Homo sapiens; identical to SEQ ID NO: 457750
  chr19:38719956-38720220
  hyper
  renal vs. ovary,sarcoma,prostate,anorectal

SEQ ID NO: 476913 - DNA, 187 bp, Homo sapiens; identical to SEQ ID NO: 352306
  chr19:38720439-38720626
  hyper
  renal vs. ovary,sarcoma,prostate,anorectal

SEQ ID NO: 476914 - DNA, 182 bp, Homo sapiens; identical to SEQ ID NO: 462644
  chr19:38852786-38852968
  hyper
  renal vs. sarcoma

SEQ ID NO: 476915 - DNA, 291 bp, Homo sapiens; identical to SEQ ID NO: 361584
  chr19:38853193-38853484
  hyper
  renal vs. sarcoma

SEQ ID NO: 476916 - DNA, 21 bp, Homo sapiens
  chr19:44455276-44455297
  hyper
  renal vs. lung
cgtttactccttgggcattct

SEQ ID NO: 476917 - DNA, 281 bp, Homo sapiens
  chr19:44455341-44455622
  hyper
  renal vs. lung
aggcaggcggatccggggaattctgggaaatgtagtccagacgctctgtggagtcgcgggagctacggctgcgggagttaccctttattctgtgatattttgagctgttctgcgtctcgcaggcccttctgaatttcctggacctactctcggaaccctcaacgagctagcgatagatttagaggaaaggaagcaccgtcggaaagcaaaggtttggaagggtgagggcggcggtttgcgatccccgcggcagagccttcttgcgtttagggctgtcctag

SEQ ID NO: 476918 - DNA, 72 bp, Homo sapiens; identical to SEQ ID NO: 374814
  chr19:44455667-44455739
  hyper
  renal vs. lung

SEQ ID NO: 476919 - DNA, 4 bp, Homo sapiens
  chr19:46379840-46379844
  hyper
  renal vs. multiple_myeloma,myeloid_neoplasm, pancreas_gallbladder,non_cancer
cgcc

SEQ ID NO: 476920 - DNA, 83 bp, Homo sapiens; identical to SEQ ID NO: 336190
  chr19:47676020-47676103
  hyper
  renal vs. liver_bileduct

SEQ ID NO: 476921 - DNA, 312 bp, Homo sapiens; identical to SEQ ID NO: 462655
  chr19:48901504-48901816
  hyper
  renal vs. thyroid

SEQ ID NO: 476922 - DNA, 89 bp, Homo sapiens
  chr19:50836203-50836292
  hyper
  renal vs. liver_bileduct
cggttccattcggagccttggtctctggacaccaaaggtgaaaatgtgaggactctctgcctacgatccttcgtcccctaaaaccctcc

SEQ ID NO: 476923 - DNA, 589 bp, Homo sapiens
  chr19:50836451-50837040
  hyper
  renal vs. liver_bileduct
tcgaggcgaggtggggatgggggaatccggggctcgagatggggggaggggtgacccagccccggcagctctgggcagcaagaggctgcagaggggggagtgacatcaccgccggaggaggggcagcaccgctcccccaacccaggggcttcaagctccgcctttatggcggaccccggggtcctggaatgccaaggcagagaggagaaacaggagacgaggtccgagggaacggtatccccgccccttagaacaggaactggtaaacccttaccaattacagccacccccgactgccacctgtggctgccgtcgcgacctgtcgcctcccacgcatgttgtggctgcgcccgcccccgtcagggcgtgaccacggcgtggactacaacgaccgtgatgctccacggagccaggagcctttgacgaaaggcagcgtaggcgagggccttcatgggactcgtagtacaaggcccatcacaagggtgcgccgtggagaaaaggggtgatacccttcgcctccctctcttcctcaactccgtgggtccatgcacaaagctttctcttcaaaaagtacgctctgaaaagaagc

SEQ ID NO: 476924 - DNA, 73 bp, Homo sapiens; identical to SEQ ID NO: 345605
  chr19:51228809-51228882
  hyper
  renal vs. melanoma

SEQ ID NO: 476925 - DNA, 1 bp, Homo sapiens
  chr19:53971573-53971574
  hyper
  renal vs. sarcoma
c

SEQ ID NO: 476926 - DNA, 3 bp, Homo sapiens
  chr19:55685223-55685226
  hyper
  renal vs. ovary,sarcoma
cga

SEQ ID NO: 476927 - DNA, 25 bp, Homo sapiens
  chr19:55690206-55690231
  hyper
  renal vs. ovary,myeloid_neoplasm,non_cancer
cgacccgggatcccagccggatttt

SEQ ID NO: 476928 - DNA, 18 bp, Homo sapiens
  chr19:56915935-56915953
  hyper
  renal vs. myeloid_neoplasm,uterine,non_cancer,prostate
gtttgacagtgtggaatc

SEQ ID NO: 476929 - DNA, 2 bp, Homo sapiens
  chr19:58011548-58011550
  hyper
  renal vs. multiple_myeloma,sarcoma,prostate
cc

SEQ ID NO: 476930 - DNA, 538 bp, Homo sapiens; identical to SEQ ID NO: 352438
  chr19:59049765-59050303
  hyper
  renal vs. ovary

SEQ ID NO: 476931 - DNA, 297 bp, Homo sapiens; identical to SEQ ID NO: 349464
  chr2:19551656-19551953
  hyper
  renal vs. thyroid

SEQ ID NO: 476932 - DNA, 5 bp, Homo sapiens
  chr2:20068485-20068490
  hyper
  renal vs. multiple_myeloma,cervical,colorectal,uterine
cggat

SEQ ID NO: 476933 - DNA, 80 bp, Homo sapiens; identical to SEQ ID NO: 464390
  chr2:26521880-26521960
  hyper
  renal vs. anorectal

SEQ ID NO: 476934 - DNA, 374 bp, Homo sapiens; identical to SEQ ID NO: 349476
  chr2:26522127-26522501
  hyper
  renal vs. anorectal

SEQ ID NO: 476935 - DNA, 59 bp, Homo sapiens; identical to SEQ ID NO: 455879
  chr2:27938267-27938326
  hyper
  renal vs. ovary

SEQ ID NO: 476936 - DNA, 38 bp, Homo sapiens; identical to SEQ ID NO: 454314
  chr2:30453530-30453568
  hyper
  renal vs. ovary

SEQ ID NO: 476937 - DNA, 462 bp, Homo sapiens; identical to SEQ ID NO: 455883
  chr2:30454942-30455404
  hyper
  renal vs. head_and_neck,cervical

SEQ ID NO: 476938 - DNA, 7 bp, Homo sapiens
  chr2:60963049-60963056
  hyper
  renal vs. ovary,sarcoma
tcgagcc

SEQ ID NO: 476939 - DNA, 121 bp, Homo sapiens; identical to SEQ ID NO: 454323
  chr2:73147029-73147150
  hyper
  renal vs. myeloid_neoplasm,thyroid,uterine,non_cancer, prostate

SEQ ID NO: 476940 - DNA, 16 bp, Homo sapiens
  chr2:73148243-73148259
  hyper
  renal vs. thyroid,myeloid_neoplasm,uterine,non_cancer, prostate
ggaccccgggtgcttc

SEQ ID NO: 476941 - DNA, 190 bp, Homo sapiens
  chr2:73150996-73151186
  hyper
  renal vs. myeloid_neoplasm,thyroid,uterine,non_cancer, cervical,bladder_and_urothelial
cgaccagttaactgaaagcaaatcgttggggctggcggccagggcagcgcccctgggaaagggcggagaaagagcgccatggacttttcttccccaccccttggcctcttccgctgccccaggcattgtgaatgtgggtccacgcctcgtccggcctgccccatctcttggcttaacagagggatctgga

SEQ ID NO: 476942 - DNA, 36 bp, Homo sapiens
  chr2:73151849-73151885
  hyper
  renal vs. myeloid_neoplasm,thyroid,uterine,non_cancer, cervical,bladder_and_urothelial
aggaggcagagtaaatgcaaactgtatcccgagccc

SEQ ID NO: 476943 - DNA, 36 bp, Homo sapiens; identical to SEQ ID NO: 476942
  chr2:73151849-73151885
  hyper
  renal vs. thyroid,uterine,bladder_and_urothelial, myeloid_neoplasm,non_cancer,cervical

SEQ ID NO: 476944 - DNA, 286 bp, Homo sapiens
  chr2:73151946-73152232
  hyper
  renal vs. thyroid,uterine,bladder_and_urothelial, myeloid_neoplasm,non_cancer,cervical
cgggcagcgcaggcagcaccgaggccactggagctggctccagccctggcattcctgcagcccttttcccgccactgtgtcggggcgctcatagtcctgcggggagccggtccgcactggctttgctgctgttcctgggcaaaactggcggggccttggctgcccaccagccaggagcgtctggggagaaagcccaggtgtcctcagactaccaacagaggggcttaaccagggaggggccagcccctgcttggggcccgagggttgctctgatccggcccaggcc

SEQ ID NO: 476945 - DNA, 46 bp, Homo sapiens; identical to SEQ ID NO: 349526
  chr2:73152264-73152310
  hyper
  renal vs. thyroid,uterine,bladder_and_urothelial, myeloid_neoplasm,non_cancer,cervical

SEQ ID NO: 476946 - DNA, 18 bp, Homo sapiens
  chr2:73152639-73152657
  hyper
  renal vs. myeloid_neoplasm,thyroid,multiple_myeloma
cgtgccggccggctccca

SEQ ID NO: 476947 - DNA, 3 bp, Homo sapiens
  chr2:73153000-73153003
  hyper
  renal vs. myeloid_neoplasm,thyroid,multiple_myeloma
tgc

SEQ ID NO: 476948 - DNA, 276 bp, Homo sapiens; identical to SEQ ID NO: 462693
  chr2:74425444-74425720
  hyper
  renal vs. ovary,lymphoid_neoplasm,bladder_and_urothelial, uterine

SEQ ID NO: 476949 - DNA, 396 bp, Homo sapiens; identical to SEQ ID NO: 462694
  chr2:74425790-74426186
  hyper
  renal vs. ovary,lymphoid_neoplasm,bladder_and_urothelial, uterine

SEQ ID NO: 476950 - DNA, 228 bp, Homo sapiens; identical to SEQ ID NO: 345018
  chr2:74426214-74426442
  hyper
  renal vs. ovary,lymphoid_neoplasm,bladder_and_urothelial, uterine

SEQ ID NO: 476951 - DNA, 73 bp, Homo sapiens; identical to SEQ ID NO: 468965
  chr2:87034584-87034657
  hyper
  renal vs. head_and_neck

SEQ ID NO: 476952 - DNA, 622 bp, Homo sapiens; identical to SEQ ID NO: 357234
  chr2:87034689-87035311
  hyper
  renal vs. head_and_neck

SEQ ID NO: 476953 - DNA, 144 bp, Homo sapiens; identical to SEQ ID NO: 349540
  chr2:88752878-88753022
  hyper
  renal vs. uterine,thyroid,myeloid_neoplasm

SEQ ID NO: 476954 - DNA, 251 bp, Homo sapiens; identical to SEQ ID NO: 459580
  chr2:96192254-96192505
  hyper
  renal vs. liver_bileduct

SEQ ID NO: 476955 - DNA, 193 bp, Homo sapiens; identical to SEQ ID NO: 346462
  chr2:96192624-96192817
  hyper
  renal vs. liver_bileduct

SEQ ID NO: 476956 - DNA, 59 bp, Homo sapiens; identical to SEQ ID NO: 345026
  chr2:96991316-96991375
  hyper
  renal vs. multiple_myeloma,non_cancer,myeloid_neoplasm, thyroid

SEQ ID NO: 476957 - DNA, 43 bp, Homo sapiens; identical to SEQ ID NO: 462703
  chr2:97203334-97203377
  hyper
  renal vs. multiple_myeloma,sarcoma,cervical

SEQ ID NO: 476958 - DNA, 39 bp, Homo sapiens; identical to SEQ ID NO: 346465
  chr2:97203545-97203584
  hyper
  renal vs. multiple_myeloma,sarcoma,cervical

SEQ ID NO: 476959 - DNA, 213 bp, Homo sapiens; identical to SEQ ID NO: 462705
  chr2:98703022-98703235
  hyper
  renal vs. ovary,upper_gi,uterine,cervical, pancreas_gallbladder,sarcoma,breast,lung,anorectal,colorectal

SEQ ID NO: 476960 - DNA, 201 bp, Homo sapiens; identical to SEQ ID NO: 462706
  chr2:98703475-98703676
  hyper
  renal vs. ovary,upper_gi,uterine,cervical, pancreas_gallbladder,sarcoma,breast,lung,anorectal,colorectal

SEQ ID NO: 476961 - DNA, 77 bp, Homo sapiens; identical to SEQ ID NO: 345029
  chr2:98703736-98703813
  hyper
  renal vs. ovary,upper_gi,uterine,cervical, pancreas_gallbladder,sarcoma,breast,lung,anorectal,colorectal

SEQ ID NO: 476962 - DNA, 399 bp, Homo sapiens
  chr2:134023956-134024355
  hyper
  renal vs. ovary,uterine,multiple_myeloma
cggaagcatacagtctgcggggacaaggactgaacggggtagtgggagccaggtgccgaagggctggggctagggtggcggcgcgcagggggcgcgcctgggcggggagtgggctggcgtctccttacctggccttcggtggagcatgctgctgcgggctgggggcggggtgggcgctgcgtccccaggggttgactccgcagcgccttcacttcgggggcagcaaggcgcgcgctgcagagccgggagttgccaaacttgccatgtccagagcgcggaggcagcctgggccacgcgctcaccgcagcccgggcacctcgcgctcctccgctttgttgtgttccgccgccagtccccctgcgcctgcctgccagtgtccccgagccctctcctgccgcg

SEQ ID NO: 476963 - DNA, 295 bp, Homo sapiens
  chr2:134024401-134024696
  hyper
  renal vs. ovary,uterine,multiple_myeloma
actttcctcctggaggcgcgcgttaaagatctgcctgggagcgcccggcgggcggctcggcttgcgctctgatgaggaggctggggcccatcgattcccaccccctacccactccccctcccctcccctccgccgggcccccccatcagaagctgcttaggatcggcgctgtcaaatccagcccatctgctgcaatcataatcagtctcaaccgaacggttctgacaaatctccgcctggagctggagttggagaagctggagagtgaggggcggggaagggaggtgggggtgag

SEQ ID NO: 476964 - DNA, 29 bp, Homo sapiens
  chr2:134024729-134024758
  hyper
  renal vs. ovary,uterine,multiple_myeloma
cctggagccttctattgtctgcccctaac

SEQ ID NO: 476965 - DNA, 51 bp, Homo sapiens; identical to SEQ ID NO: 453124
  chr2:149632592-149632643
  hyper
  renal vs. sarcoma,ovary,prostate

SEQ ID NO: 476966 - DNA, 9 bp, Homo sapiens
  chr2:160760627-160760636
  hyper
  renal vs. lymphoid_neoplasm
cgggaatcg

SEQ ID NO: 476967 - DNA, 834 bp, Homo sapiens; identical to SEQ ID NO: 462736
  chr2:174219533-174220367
  hyper
  renal vs. upper_gi

SEQ ID NO: 476968 - DNA, 5 bp, Homo sapiens
  chr2:182321353-182321358
  hyper
  renal vs. myeloid_neoplasm
cgtgg

SEQ ID NO: 476969 - DNA, 34 bp, Homo sapiens; identical to SEQ ID NO: 345053
  chr2:182323095-182323129
  hyper
  renal vs. thyroid

SEQ ID NO: 476970 - DNA, 134 bp, Homo sapiens; identical to SEQ ID NO: 462747
  chr2:200326735-200326869
  hyper
  renal vs. myeloid_neoplasm

SEQ ID NO: 476971 - DNA, 280 bp, Homo sapiens; identical to SEQ ID NO: 462748
  chr2:200326960-200327240
  hyper
  renal vs. myeloid_neoplasm

SEQ ID NO: 476972 - DNA, 197 bp, Homo sapiens; identical to SEQ ID NO: 357433
  chr2:200329745-200329942
  hyper
  renal vs. myeloid_neoplasm

SEQ ID NO: 476973 - DNA, 11 bp, Homo sapiens
  chr2:207139040-207139051
  hyper
  renal vs. melanoma
cggaaacgact

SEQ ID NO: 476974 - DNA, 433 bp, Homo sapiens; identical to SEQ ID NO: 369923
  chr2:219748345-219748778
  hyper

SEQ ID NO: 476975 - DNA, 42 bp, Homo sapiens
  chr2:219857682-219857724
  hyper
  renal vs. ovary
cggtggaacccagcgcccctcaacccagcccagccgcggcca

SEQ ID NO: 476976 - DNA, 74 bp, Homo sapiens; identical to SEQ ID NO: 357463
  chr2:219858468-219858542
  hyper
  renal vs. ovary

SEQ ID NO: 476977 - DNA, 206 bp, Homo sapiens; identical to SEQ ID NO: 455917
  chr2:241771771-241771977
  hyper
  renal vs. ovary,uterine

SEQ ID NO: 476978 - DNA, 2 bp, Homo sapiens
  chr2:241772136-241772138
  hyper
  renal vs. ovary,uterine
cc

SEQ ID NO: 476979 - DNA, 79 bp, Homo sapiens; identical to SEQ ID NO: 345625
  chr20:20350750-20350829
  hyper
  renal vs. anorectal,prostate

SEQ ID NO: 476980 - DNA, 206 bp, Homo sapiens; identical to SEQ ID NO: 453161
  chr20:21080357-21080563
  hyper
  renal vs. thyroid,non_cancer,colorectal,multiple_myeloma, myeloid_neoplasm

SEQ ID NO: 476981 - DNA, 62 bp, Homo sapiens; identical to SEQ ID NO: 453168
  chr20:30639044-30639106
  hyper
  renal vs. multiple_myeloma,thyroid,non_cancer

SEQ ID NO: 476982 - DNA, 139 bp, Homo sapiens; identical to SEQ ID NO: 453169
  chr20:30639494-30639633
  hyper
  renal vs. multiple_myeloma,thyroid,non_cancer

SEQ ID NO: 476983 - DNA, 5 bp, Homo sapiens
  chr20:34188561-34188566
  hyper
  renal vs. thyroid
cgtcc

SEQ ID NO: 476984 - DNA, 37 bp, Homo sapiens; identical to SEQ ID NO: 347675
  chr20:37358242-37358279
  hyper
  renal vs. multiple_myeloma,thyroid

SEQ ID NO: 476985 - DNA, 390 bp, Homo sapiens; identical to SEQ ID NO: 455936
  chr20:37433723-37434113
  hyper
  renal vs. ovary,multiple_myeloma

SEQ ID NO: 476986 - DNA, 27 bp, Homo sapiens
  chr20:37434086-37434113
  hyper
  renal vs. multiple_myeloma,ovary
cggggtgggggttaggaaaactatttt

SEQ ID NO: 476987 - DNA, 285 bp, Homo sapiens; identical to SEQ ID NO: 469056
  chr20:55839319-55839604
  hyper

SEQ ID NO: 476988 - DNA, 23 bp, Homo sapiens
  chr20:55839779-55839802
  hyper
aatacttaaaatagaagactagc

SEQ ID NO: 476989 - DNA, 1 bp, Homo sapiens
  chr20:57224597-57224598
  hyper
  renal vs. myeloid_neoplasm,thyroid,non_cancer, multiple_myeloma
c

SEQ ID NO: 476990 - DNA, 113 bp, Homo sapiens; identical to SEQ ID NO: 345643
  chr20:57225466-57225579
  hyper
  renal vs. myeloid_neoplasm,thyroid,non_cancer, multiple_myeloma

SEQ ID NO: 476991 - DNA, 71 bp, Homo sapiens; identical to SEQ ID NO: 455947
  chr20:61585229-61585300
  hyper
  renal vs. myeloid_neoplasm

SEQ ID NO: 476992 - DNA, 84 bp, Homo sapiens; identical to SEQ ID NO: 347693
  chr20:61664570-61664654
  hyper
  renal vs. anorectal

SEQ ID NO: 476993 - DNA, 48 bp, Homo sapiens
  chr21:15588309-15588357
  hyper
  renal vs. prostate,thyroid
cgcccagccctacgccaggcgagggagcagtgcggtgggcggtacccc

SEQ ID NO: 476994 - DNA, 66 bp, Homo sapiens; identical to SEQ ID NO: 375197
  chr21:15588911-15588977
  hyper
  renal vs. prostate,thyroid

SEQ ID NO: 476995 - DNA, 61 bp, Homo sapiens; identical to SEQ ID NO: 469064
  chr21:42688559-42688620
  hyper

SEQ ID NO: 476996 - DNA, 91 bp, Homo sapiens
  chr21:48087109-48087200
  hyper
  renal vs. ovary
cgtgatgcaggtgagcaatgatgcagagggctctgtgcgcctggcgggctctgtttgcctgctgggctctgtgcgcctgctgggctctgtg

SEQ ID NO: 476997 - DNA, 68 bp, Homo sapiens; identical to SEQ ID NO: 457947
  chr22:21368234-21368302
  hyper
  renal vs. ovary

SEQ ID NO: 476998 - DNA, 94 bp, Homo sapiens; identical to SEQ ID NO: 362020
  chr22:21368697-21368791
  hyper
  renal vs. ovary

SEQ ID NO: 476999 - DNA, 137 bp, Homo sapiens; identical to SEQ ID NO: 453177
  chr22:22862472-22862609
  hyper
  renal vs. uterine

SEQ ID NO: 477000 - DNA, 187 bp, Homo sapiens; identical to SEQ ID NO: 295268
  chr22:24552924-24553111
  hyper
  renal vs. sarcoma,multiple_myeloma,melanoma,anorectal, myeloid_neoplasm,non_cancer,thyroid,lymphoid_neoplasm,breast, bladder_and_urothelial

SEQ ID NO: 477001 - DNA, 97 bp, Homo sapiens; identical to SEQ ID NO: 455955
  chr22:27053098-27053195
  hyper
  renal vs. anorectal

SEQ ID NO: 477002 - DNA, 268 bp, Homo sapiens; identical to SEQ ID NO: 455956
  chr22:27053250-27053518
  hyper
  renal vs. anorectal

SEQ ID NO: 477003 - DNA, 81 bp, Homo sapiens; identical to SEQ ID NO: 462790
  chr22:27053437-27053518
  hyper
  renal vs. multiple_myeloma,ovary

SEQ ID NO: 477004 - DNA, 230 bp, Homo sapiens; identical to SEQ ID NO: 352595
  chr22:27054028-27054258
  hyper
  renal vs. multiple_myeloma,ovary

SEQ ID NO: 477005 - DNA, 35 bp, Homo sapiens; identical to SEQ ID NO: 362063
  chr22:37731278-37731313
  hyper
  renal vs. sarcoma,ovary

SEQ ID NO: 477006 - DNA, 234 bp, Homo sapiens
  chr3:10183473-10183707
  hyper
  renal vs. liver_bileduct,lung,ovary,upper_gi, lymphoid_neoplasm
cgcgtccgacccgcggatcccgcggcgtccggcccgggtggtctggatcgcggagggaatgccccggagggcggagaactgggacgaggccgaggtaggcgcggaggaggcaggcgtcgaagagtacggccctgaagaagacggcggggaggagtcgggcgccgaggagtccggcccggaagagtccggcccggaggaactgggcgccgaggaggagatggaggccgggcggcc

SEQ ID NO: 477007 - DNA, 176 bp, Homo sapiens; identical to SEQ ID NO: 357540
  chr3:10183782-10183958
  hyper
  renal vs. liver_bileduct,lung,ovary,upper_gi, lymphoid_neoplasm

SEQ ID NO: 477008 - DNA, 132 bp, Homo sapiens; identical to SEQ ID NO: 469114
  chr3:43935666-43935798
  hyper
  renal vs. ovary

SEQ ID NO: 477009 - DNA, 427 bp, Homo sapiens; identical to SEQ ID NO: 469116
  chr3:44038922-44039349
  hyper
  renal vs. ovary

SEQ ID NO: 477010 - DNA, 234 bp, Homo sapiens; identical to SEQ ID NO: 453203
  chr3:49906737-49906971
  hyper
  renal vs. uterine

SEQ ID NO: 477011 - DNA, 49 bp, Homo sapiens; identical to SEQ ID NO: 349768
  chr3:49907379-49907428
  hyper
  renal vs. uterine

SEQ ID NO: 477012 - DNA, 82 bp, Homo sapiens; identical to SEQ ID NO: 454369
  chr3:50377892-50377974
  hyper
  renal vs. anorectal

SEQ ID NO: 477013 - DNA, 167 bp, Homo sapiens; identical to SEQ ID NO: 346566
  chr3:50378002-50378169
  hyper
  renal vs. anorectal

SEQ ID NO: 477014 - DNA, 832 bp, Homo sapiens; identical to SEQ ID NO: 345097
  chr3:113251180-113252012
  hyper
  renal vs. uterine,multiple_myeloma,cervical,ovary, anorectal,myeloid_neoplasm,upper_gi,breast,prostate,non_cancer, thyroid,lung,pancreas_gallbladder,colorectal

SEQ ID NO: 477015 - DNA, 824 bp, Homo sapiens; identical to SEQ ID NO: 469142
  chr3:113251532-113252356
  hyper
  renal vs. multiple_myeloma,uterine,cervical,anorectal, myeloid_neoplasm,non_cancer,thyroid,breast,upper_gi,lung, bladder_and_urothelial

SEQ ID NO: 477016 - DNA, 13 bp, Homo sapiens
  chr3:138679565-138679578
  hyper
  renal vs. myeloid_neoplasm,thyroid
cgggcacagacgc

SEQ ID NO: 477017 - DNA, 35 bp, Homo sapiens; identical to SEQ ID NO: 370226
  chr3:141120999-141121034
  hyper
  renal vs. upper_gi

SEQ ID NO: 477018 - DNA, 86 bp, Homo sapiens; identical to SEQ ID NO: 458017
  chr3:150802802-150802888
  hyper
  renal vs. ovary

SEQ ID NO: 477019 - DNA, 138 bp, Homo sapiens; identical to SEQ ID NO: 345119
  chr3:179169640-179169778
  hyper
  renal vs. cervical,ovary

SEQ ID NO: 477020 - DNA, 291 bp, Homo sapiens; identical to SEQ ID NO: 453235
  chr3:186079331-186079622
  hyper
  renal vs. multiple_myeloma

SEQ ID NO: 477021 - DNA, 125 bp, Homo sapiens; identical to SEQ ID NO: 453236
  chr3:186079497-186079622
  hyper
  renal vs. ovary

SEQ ID NO: 477022 - DNA, 147 bp, Homo sapiens; identical to SEQ ID NO: 459701
  chr3:194407289-194407436
  hyper
  renal vs. multiple_myeloma,sarcoma

SEQ ID NO: 477023 - DNA, 154 bp, Homo sapiens; identical to SEQ ID NO: 459702
  chr3:194407836-194407990
  hyper
  renal vs. multiple_myeloma,sarcoma

SEQ ID NO: 477024 - DNA, 3 bp, Homo sapiens
  chr3:194407996-194407999
  hyper
  renal vs. multiple_myeloma,sarcoma
cgg

SEQ ID NO: 477025 - DNA, 102 bp, Homo sapiens; identical to SEQ ID NO: 459704
  chr3:194408028-194408130
  hyper
  renal vs. multiple_myeloma,sarcoma

SEQ ID NO: 477026 - DNA, 68 bp, Homo sapiens; identical to SEQ ID NO: 331995
  chr3:196366368-196366436
  hyper
  renal vs. multiple_myeloma

SEQ ID NO: 477027 - DNA, 25 bp, Homo sapiens
  chr4:10459327-10459352
  hyper
  renal vs. sarcoma
gggtcccgcggagggcggccttggc

SEQ ID NO: 477028 - DNA, 29 bp, Homo sapiens
  chr4:13549864-13549893
  hyper
  renal vs. uterine,sarcoma
gcgatccaaaccgcctaagcatcccaagc

SEQ ID NO: 477029 - DNA, 6 bp, Homo sapiens
  chr4:57521376-57521382
  hyper
  renal vs. myeloid_neoplasm,non_cancer,multiple_myeloma, sarcoma
cgggga

SEQ ID NO: 477030 - DNA, 642 bp, Homo sapiens; identical to SEQ ID NO: 332131
  chr4:82391851-82392493
  hyper
  renal vs. upper_gi,pancreas_gallbladder,head_and_neck

SEQ ID NO: 477031 - DNA, 693 bp, Homo sapiens
  chr4:103997179-103997872
  hyper
  renal vs. sarcoma,uterine,anorectal,upper_gi,ovary, myeloid_neoplasm,lymphoid_neoplasm,non_cancer, bladder_and_urothelial,head_and_neck,multiple_myeloma,breast, prostate
cgccaacaccttacaacagtaaacagacacgcgcccgtcaccgggtgtacaaacagaaaaggctgggcccctcgctcgcgtctccggtccagcaggcctacagggtacccgccgctggcgctgggtttatttttacccttagtgtctctggggcctctcacctggcagtctccggcgaagtcgaccaggctccgtctgaacgattaggaaaggggctgtgggggaggcggcggagcccggtctagccaccgcgctctggggttcccgattcgcgcatcttcccaggctgagccgggaggctgcgttgactgcagataaacggtctcagggcgcggcaccgcgtgtagtcggccccgcctttcgcacgaacccgctgggcgacaccgcgcagggaggtccgacccgtcggcgccggtacaggctccggagtaagcatgggttggtccggggcccgcagcggcagccccgtgtgccctccgccgggtttcaggtccggcggcgcgggtgcagagccgcgtgcgatgcctggtgcgcgtggcttcccccggaaaggtggcgccaggccgaccatgggcccacgtcccggggcctcggagcggcaccgcgcggtctttcagctgcttatcctccctgggcgggtccgcaggcttctggggccaggaccagcgagctcccgggaaagcttcccggaaa

SEQ ID NO: 477032 - DNA, 191 bp, Homo sapiens; identical to SEQ ID NO: 462867
  chr4:153600941-153601132
  hyper
  renal vs. ovary

SEQ ID NO: 477033 - DNA, 261 bp, Homo sapiens; identical to SEQ ID NO: 349999
  chr4:153601161-153601422
  hyper
  renal vs. ovary

SEQ ID NO: 477034 - DNA, 365 bp, Homo sapiens; identical to SEQ ID NO: 332268
  chr4:185747631-185747996
  hyper
  renal vs. bladder_and_urothelial,upper_gi

SEQ ID NO: 477035 - DNA, 829 bp, Homo sapiens; identical to SEQ ID NO: 346671
  chr5:472600-473429
  hyper
  renal vs. liver_bileduct,head_and_neck,breast, lymphoid_neoplasm,anorectal,uterine,bladder_and_urothelial,lung, myeloid_neoplasm,thyroid,sarcoma,ovary,multiple_myeloma

SEQ ID NO: 477036 - DNA, 966 bp, Homo sapiens; identical to SEQ ID NO: 469215
  chr5:472934-473900
  hyper
  renal vs. liver_bileduct

SEQ ID NO: 477037 - DNA, 829 bp, Homo sapiens; identical to SEQ ID NO: 469216
  chr5:473431-474260
  hyper
  renal vs. liver_bileduct,head_and_neck

SEQ ID NO: 477038 - DNA, 479 bp, Homo sapiens
  chr5:31854462-31854941
  hyper
  renal vs. ovary,lung,uterine,multiple_myeloma,anorectal, myeloid_neoplasm,pancreas_gallbladder,breast, bladder_and_urothelial,head_and_neck,cervical,non_cancer
cgggagaaggtataaaggaaatgcttcagtcgtgcagtcaccggcgattgtaattcagcggtgttaactttggttactccagccgaaaggctctgaccggggatttctggaaagttccctgacatcctgccccatacgatggttgtgattttagctgggggctccacccctgtaagaactcaggctgccgcggattatgaaacggagtggtcatgaagtgaattgatgtgggaaggtggagcttcttgcaatggctcggagggagaacttttggtgcaaacgagggtctagggtagggcgctttttcctctaacctgctccaggtttgccccaggaagctcctgagccctcggtgtaaacaaaggtgtctggatgagaagccccaaactccctgaaatcctccccagggcggtttccttttcccggcgaggggagtgaccggggaggggatcttggaatgccgtggggttttgacaagt

SEQ ID NO: 477039 - DNA, 70 bp, Homo sapiens
  chr5:31854871-31854941
  hyper
  renal vs. anorectal,cervical,ovary,lung,uterine, bladder_and_urothelial,breast,pancreas_gallbladder, multiple_myeloma,non_cancer,thyroid,myeloid_neoplasm,prostate, head_and_neck
cggtttccttttcccggcgaggggagtgaccggggaggggatcttggaatgccgtggggttttgacaagt

SEQ ID NO: 477040 - DNA, 22 bp, Homo sapiens
  chr5:40680513-40680535
  hyper
  renal vs. multiple_myeloma
cgggtccaggacatctgagggc

SEQ ID NO: 477041 - DNA, 337 bp, Homo sapiens; identical to SEQ ID NO: 456017
  chr5:40680627-40680964
  hyper
  renal vs. multiple_myeloma

SEQ ID NO: 477042 - DNA, 89 bp, Homo sapiens; identical to SEQ ID NO: 456018
  chr5:40680875-40680964
  hyper
  renal vs. multiple_myeloma,cervical,lymphoid_neoplasm

SEQ ID NO: 477043 - DNA, 99 bp, Homo sapiens; identical to SEQ ID NO: 453281
  chr5:42950747-42950846
  hyper
  renal vs. sarcoma

SEQ ID NO: 477044 - DNA, 2 bp, Homo sapiens
  chr5:43008736-43008738
  hyper
  renal vs. colorectal,multiple_myeloma
cg

SEQ ID NO: 477045 - DNA, 388 bp, Homo sapiens; identical to SEQ ID NO: 456025
  chr5:43017314-43017702
  hyper
  renal vs. colorectal,cervical,non_cancer,anorectal, myeloid_neoplasm,multiple_myeloma,thyroid

SEQ ID NO: 477046 - DNA, 50 bp, Homo sapiens; identical to SEQ ID NO: 345162
  chr5:49737299-49737349
  hyper
  renal vs. multiple_myeloma,thyroid,prostate, myeloid_neoplasm,non_cancer,lymphoid_neoplasm,anorectal, bladder_and_urothelial,pancreas_gallbladder,ovary

SEQ ID NO: 477047 - DNA, 129 bp, Homo sapiens; identical to SEQ ID NO: 475741
  chr5:58334886-58335015
  hyper
  renal vs. uterine,cervical,breast,colorectal,ovary, non_cancer,thyroid,pancreas_gallbladder,lung,upper_gi, myeloid_neoplasm,bladder_and_urothelial,multiple_myeloma, head_and_neck,anorectal,sarcoma,lymphoid_neoplasm,melanoma,
  CONT. FROM ABOVE: prostate

SEQ ID NO: 477048 - DNA, 211 bp, Homo sapiens; identical to SEQ ID NO: 469230
  chr5:58335353-58335564
  hyper
  renal vs. uterine,cervical,breast,colorectal,ovary, non_cancer,thyroid,pancreas_gallbladder,lung,upper_gi, myeloid_neoplasm,bladder_and_urothelial,multiple_myeloma, head_and_neck,anorectal,sarcoma,lymphoid_neoplasm,melanoma,
  CONT. FROM ABOVE: prostate

SEQ ID NO: 477049 - DNA, 211 bp, Homo sapiens; identical to SEQ ID NO: 469230
  chr5:58335353-58335564
  hyper
  renal vs. sarcoma,pancreas_gallbladder,myeloid_neoplasm, colorectal,thyroid,ovary,uterine,non_cancer,upper_gi,breast, cervical,lung,multiple_myeloma,anorectal,bladder_and_urothelial, lymphoid_neoplasm,prostate

SEQ ID NO: 477050 - DNA, 73 bp, Homo sapiens; identical to SEQ ID NO: 345171
  chr5:58335881-58335954
  hyper
  renal vs. sarcoma,pancreas_gallbladder,myeloid_neoplasm, colorectal,thyroid,ovary,uterine,non_cancer,upper_gi,breast, cervical,lung,multiple_myeloma,anorectal,bladder_and_urothelial, lymphoid_neoplasm,prostate

SEQ ID NO: 477051 - DNA, 756 bp, Homo sapiens
  chr5:66299591-66300347
  hyper
  renal vs. lung,sarcoma,bladder_and_urothelial, pancreas_gallbladder,non_cancer,colorectal,uterine, head_and_neck,ovary,breast,prostate,upper_gi,cervical,anorectal, thyroid,multiple_myeloma,liver_bileduct,myeloid_neoplasm,
  CONT. FROM ABOVE: lymphoid_neoplasm
cgtacttgaaggggcaatacttgtagcatttgccacataaatgccaggtagtgtctttccacatcggggctcaccattacctagatctgtagttgccggccatgaagccaaacaggtgtgcaccgtggtcattgatggaacagatgtaaactcataaatttagtttactgaggttttcggtgagtgtggcttcccgtccgcgtgcttttcctatacaaccagcggcgtcctggcggaggagtcactgtggacttccccggagcgttgtcactgccatccctcccgcggtgaatcacaggtcggcctcaggtgcgcgcagcacacacccggagcagccgcgggtttatttatttatttccgggacggatccattccgggctccggggagggggagcggcggcccaggctgcggggctgtcccggcaccggctggggtcgcgccgcggccgcctgctccctttcccgtgagcccccgctcctcaggcgcggccggggctggtggggggtgggggatgcaggaaagctgggggcgcggccaccaagctgtccagggacaaggccctgccgcctcctcccagccggaccctggaagggtccacaaaggtgtcaggttcaagtcctccaataggcccattttttaaaagtgcttttaagtttccgcttttttcaggaggggagggcaagagcagctttttctattcaaattcttttccttgtatgtagataccaaaaggaaactcggcactgggcatgttc

SEQ ID NO: 477052 - DNA, 760 bp, Homo sapiens
  chr5:66299874-66300634
  hyper
  renal vs. multiple_myeloma,lung,bladder_and_urothelial, pancreas_gallbladder,colorectal,head_and_neck,non_cancer,breast, prostate,uterine,ovary,cervical,thyroid,upper_gi,anorectal, myeloid_neoplasm,sarcoma,liver_bileduct,lymphoid_neoplasm,
  CONT. FROM ABOVE: melanoma
cgcggtgaatcacaggtcggcctcaggtgcgcgcagcacacacccggagcagccgcgggtttatttatttatttccgggacggatccattccgggctccggggagggggagcggcggcccaggctgcggggctgtcccggcaccggctggggtcgcgccgcggccgcctgctccctttcccgtgagcccccgctcctcaggcgcggccggggctggtggggggtgggggatgcaggaaagctgggggcgcggccaccaagctgtccagggacaaggccctgccgcctcctcccagccggaccctggaagggtccacaaaggtgtcaggttcaagtcctccaataggcccattttttaaaagtgcttttaagtttccgcttttttcaggaggggagggcaagagcagctttttctattcaaattcttttccttgtatgtagataccaaaaggaaactcggcactgggcatgttcggatgtgaatggttttgctgataagcaacagcctccggaaccaaagcctcaaaatagtcgtctcccccgcccctcgcagaagcggcgagtggtatctgccaaacagatgacaaagtacctccgactgaatcccacagacagcgctttgagcagaacgcacggctcaactcatgtaattactgtttatagctggccgagcctgactaggagagggcagacccgagaggaaatcagtttcccggacctttgagaggaggctgtgtgttaattaaaggctaggacgggac

SEQ ID NO: 477053 - DNA, 98 bp, Homo sapiens; identical to SEQ ID NO: 472576
  chr5:66511687-66511785
  hyper
  renal vs. myeloid_neoplasm

SEQ ID NO: 477054 - DNA, 53 bp, Homo sapiens; identical to SEQ ID NO: 453291
  chr5:75698192-75698245
  hyper
  renal vs. ovary

SEQ ID NO: 477055 - DNA, 916 bp, Homo sapiens; identical to SEQ ID NO: 453292
  chr5:75698274-75699190
  hyper
  renal vs. ovary

SEQ ID NO: 477056 - DNA, 15 bp, Homo sapiens
  chr5:77269447-77269462
  hyper
  renal vs. multiple_myeloma,myeloid_neoplasm
ttccccgcggggctc

SEQ ID NO: 477057 - DNA, 768 bp, Homo sapiens; identical to SEQ ID NO: 471260
  chr5:78531956-78532724
  hyper
  renal vs. lung

SEQ ID NO: 477058 - DNA, 994 bp, Homo sapiens; identical to SEQ ID NO: 471261
  chr5:78532228-78533222
  hyper
  renal vs. bladder_and_urothelial,lung,head_and_neck, uterine

SEQ ID NO: 477059 - DNA, 22 bp, Homo sapiens
  chr5:92906252-92906274
  hyper
  renal vs. thyroid,non_cancer,myeloid_neoplasm
cgccaactgcccgcgcggaacc

SEQ ID NO: 477060 - DNA, 58 bp, Homo sapiens; identical to SEQ ID NO: 453320
  chr5:114515671-114515729
  hyper
  renal vs. prostate,myeloid_neoplasm,thyroid,ovary

SEQ ID NO: 477061 - DNA, 132 bp, Homo sapiens; identical to SEQ ID NO: 453321
  chr5:114515769-114515901
  hyper
  renal vs. prostate,myeloid_neoplasm,thyroid,ovary

SEQ ID NO: 477062 - DNA, 44 bp, Homo sapiens; identical to SEQ ID NO: 346728
  chr5:114516274-114516318
  hyper
  renal vs. prostate,myeloid_neoplasm,thyroid,ovary

SEQ ID NO: 477063 - DNA, 5 bp, Homo sapiens
  chr5:131593084-131593089
  hyper
  renal vs. sarcoma,thyroid,cervical,non_cancer,ovary, uterine,head_and_neck
cgaca

SEQ ID NO: 477064 - DNA, 3 bp, Homo sapiens
  chr5:131593515-131593518
  hyper
  renal vs. sarcoma,thyroid,cervical,non_cancer,ovary, uterine,head_and_neck
cac

SEQ ID NO: 477065 - DNA, 173 bp, Homo sapiens
  chr5:134370281-134370454
  hyper
  renal vs. colorectal,lung,pancreas_gallbladder
cgcctagaatcaactcccgtctcggccgcctcgaagtccccagccctggcgagaacagcccaggatgagtgaatgtttgccgaacaggatcgcaccgagcgggcgccttcgagccagcgccggggcgggggcagagcccggggcccgttccggcagctcccagcggtgtcctc

SEQ ID NO: 477066 - DNA, 38 bp, Homo sapiens; identical to SEQ ID NO: 358244
  chr5:134370508-134370546
  hyper
  renal vs. colorectal,lung,pancreas_gallbladder

SEQ ID NO: 477067 - DNA, 73 bp, Homo sapiens; identical to SEQ ID NO: 345194
  chr5:134880614-134880687
  hyper
  renal vs. thyroid,myeloid_neoplasm,non_cancer

SEQ ID NO: 477068 - DNA, 335 bp, Homo sapiens; identical to SEQ ID NO: 350178
  chr5:139135589-139135924
  hyper
  renal vs. ovary,colorectal

SEQ ID NO: 477069 - DNA, 183 bp, Homo sapiens; identical to SEQ ID NO: 467492
  chr5:149681827-149682010
  hyper
  renal vs. multiple_myeloma

SEQ ID NO: 477070 - DNA, 102 bp, Homo sapiens; identical to SEQ ID NO: 469260
  chr5:149682691-149682793
  hyper
  renal vs. ovary

SEQ ID NO: 477071 - DNA, 1 bp, Homo sapiens
  chr5:149682867-149682868
  hyper
  renal vs. ovary
c

SEQ ID NO: 477072 - DNA, 240 bp, Homo sapiens; identical to SEQ ID NO: 462923
  chr5:157098032-157098272
  hyper
  renal vs. multiple_myeloma

SEQ ID NO: 477073 - DNA, 13 bp, Homo sapiens
  chr5:169063996-169064009
  hyper
  renal vs. multiple_myeloma,myeloid_neoplasm, lymphoid_neoplasm
cggcaatcaggaa

SEQ ID NO: 477074 - DNA, 61 bp, Homo sapiens; identical to SEQ ID NO: 453345
  chr6:391113-391174
  hyper
  renal vs. lymphoid_neoplasm

SEQ ID NO: 477075 - DNA, 368 bp, Homo sapiens; identical to SEQ ID NO: 464667
  chr6:26204318-26204686
  hyper
  renal vs. cervical,upper_gi,uterine,colorectal, non_cancer,prostate

SEQ ID NO: 477076 - DNA, 205 bp, Homo sapiens; identical to SEQ ID NO: 464668
  chr6:26205298-26205503
  hyper
  renal vs. cervical,colorectal,uterine,upper_gi

SEQ ID NO: 477077 - DNA, 55 bp, Homo sapiens; identical to SEQ ID NO: 345214
  chr6:26205712-26205767
  hyper
  renal vs. cervical,colorectal,uterine,upper_gi

SEQ ID NO: 477078 - DNA, 6 bp, Homo sapiens
  chr6:26216805-26216811
  hyper
  renal vs. uterine,non_cancer,prostate,thyroid, myeloid_neoplasm,colorectal,upper_gi,multiple_myeloma, head_and_neck,cervical
cgcctt

SEQ ID NO: 477079 - DNA, 224 bp, Homo sapiens; identical to SEQ ID NO: 453355
  chr6:26216853-26217077
  hyper
  renal vs. uterine,non_cancer,prostate,thyroid, myeloid_neoplasm,colorectal,upper_gi,multiple_myeloma, head_and_neck,cervical

SEQ ID NO: 477080 - DNA, 210 bp, Homo sapiens; identical to SEQ ID NO: 453356
  chr6:26217156-26217366
  hyper
  renal vs. uterine,non_cancer,prostate,thyroid, myeloid_neoplasm,colorectal,upper_gi,multiple_myeloma, head_and_neck,cervical

SEQ ID NO: 477081 - DNA, 210 bp, Homo sapiens; identical to SEQ ID NO: 453356
  chr6:26217156-26217366
  hyper
  renal vs. multiple_myeloma,uterine,cervical,non_cancer, myeloid_neoplasm,prostate,colorectal,thyroid,head_and_neck, upper_gi

SEQ ID NO: 477082 - DNA, 312 bp, Homo sapiens; identical to SEQ ID NO: 345216
  chr6:26217578-26217890
  hyper
  renal vs. multiple_myeloma,uterine,cervical,non_cancer, myeloid_neoplasm,prostate,colorectal,thyroid,head_and_neck, upper_gi

SEQ ID NO: 477083 - DNA, 1 bp, Homo sapiens
  chr6:26250181-26250182
  hyper
  renal vs. myeloid_neoplasm,anorectal,thyroid,non_cancer, multiple_myeloma
c

SEQ ID NO: 477084 - DNA, 130 bp, Homo sapiens; identical to SEQ ID NO: 454440
  chr6:26271217-26271347
  hyper
  renal vs. thyroid,anorectal,non_cancer,myeloid_neoplasm

SEQ ID NO: 477085 - DNA, 327 bp, Homo sapiens; identical to SEQ ID NO: 454441
  chr6:26272105-26272432
  hyper
  renal vs. anorectal,myeloid_neoplasm,thyroid,non_cancer, multiple_myeloma

SEQ ID NO: 477086 - DNA, 248 bp, Homo sapiens; identical to SEQ ID NO: 453365
  chr6:26577475-26577723
  hyper
  renal vs. multiple_myeloma

SEQ ID NO: 477087 - DNA, 180 bp, Homo sapiens
  chr6:27099585-27099765
  hyper
  renal vs. pancreas_gallbladder
cgctctatccaacgaaaactaattagaaataaatctccttcccgaaagcgataaaatactaaagaatgagaaactgacagtttactgagtttgtaaggaaggccaaataaaggcggggtttggattcctttggcgcacccaagccgaccgtggacttcctggatacaacaaccaatcagg

SEQ ID NO: 477088 - DNA, 26 bp, Homo sapiens
  chr6:27099874-27099900
  hyper
  renal vs. pancreas_gallbladder
gtttctaacgtattttaattggtttc

SEQ ID NO: 477089 - DNA, 2 bp, Homo sapiens
  chr6:27100290-27100292
  hyper
  renal vs. head_and_neck,lymphoid_neoplasm,cervical, melanoma,anorectal,non_cancer,colorectal,thyroid, myeloid_neoplasm,multiple_myeloma,uterine, bladder_and_urothelial
cg

SEQ ID NO: 477090 - DNA, 61 bp, Homo sapiens; identical to SEQ ID NO: 462956
  chr6:27100389-27100450
  hyper
  renal vs. head_and_neck,lymphoid_neoplasm,cervical, melanoma,anorectal,non_cancer,colorectal,thyroid, myeloid_neoplasm,multiple_myeloma,uterine, bladder_and_urothelial

SEQ ID NO: 477091 - DNA, 61 bp, Homo sapiens; identical to SEQ ID NO: 462957
  chr6:27101049-27101110
  hyper
  renal vs. lymphoid_neoplasm,head_and_neck,cervical, melanoma,anorectal,myeloid_neoplasm,non_cancer,thyroid, colorectal,uterine,bladder_and_urothelial,multiple_myeloma

SEQ ID NO: 477092 - DNA, 87 bp, Homo sapiens; identical to SEQ ID NO: 345226
  chr6:27101206-27101293
  hyper
  renal vs. lymphoid_neoplasm,head_and_neck,cervical, melanoma,anorectal,myeloid_neoplasm,non_cancer,thyroid, colorectal,uterine,bladder_and_urothelial,multiple_myeloma

SEQ ID NO: 477093 - DNA, 110 bp, Homo sapiens
  chr6:27775595-27775705
  hyper
  renal vs. sarcoma,lymphoid_neoplasm,multiple_myeloma, anorectal,colorectal,non_cancer
cgcttcttgccatccttcttctgggccttggtcaccgccttcttggagcccttcttcggggcgggagcagacttggccagctcgggcataatgaaacaatagtggcaaaa

SEQ ID NO: 477094 - DNA, 28 bp, Homo sapiens
  chr6:27776011-27776039
  hyper
  renal vs. sarcoma,lymphoid_neoplasm,multiple_myeloma, anorectal,colorectal,non_cancer
ggcaaagctcgcgccaaggccaagaccc

SEQ ID NO: 477095 - DNA, 68 bp, Homo sapiens; identical to SEQ ID NO: 454446
  chr6:27777648-27777716
  hyper
  renal vs. uterine,upper_gi,non_cancer,anorectal, colorectal,myeloid_neoplasm,melanoma,thyroid,lymphoid_neoplasm

SEQ ID NO: 477096 - DNA, 402 bp, Homo sapiens; identical to SEQ ID NO: 350335
  chr6:27778156-27778558
  hyper
  renal vs. uterine,upper_gi,non_cancer,anorectal, colorectal,myeloid_neoplasm,melanoma,thyroid,lymphoid_neoplasm

SEQ ID NO: 477097 - DNA, 413 bp, Homo sapiens
  chr6:27840617-27841030
  hyper
  renal vs. thyroid
ttgggcgttgcggaccacagtgtcatagttacacagccctcgcattggtagcggtaaagtaatcgatacaagataaatgagaccggctgtttcattatgacttttgcaaaaaccagagaggcgttatagatttggccgtgtatcagagaagccggcacttttaaccactaagtaatgctgaaaggggcaccgaacctcaaacttcagcgactgcttatgtggaatcgctaatttgccaaaactgccatacgtttaagtgttcttaagaaattaactatctttagtctacagctctttcacagacttcatgggtggccctgagaagggcctttgaggaaccgtgtaagtaagtaaaacactcagccgccaaagccatacagggtgcggccctggcgcttgagcgcgtaaaccac

SEQ ID NO: 477098 - DNA, 31 bp, Homo sapiens; identical to SEQ ID NO: 469326
  chr6:34433449-34433480
  hyper
  renal vs. ovary

SEQ ID NO: 477099 - DNA, 441 bp, Homo sapiens; identical to SEQ ID NO: 358497
  chr6:35744202-35744643
  hyper
  renal vs. ovary

SEQ ID NO: 477100 - DNA, 370 bp, Homo sapiens; identical to SEQ ID NO: 469334
  chr6:37666475-37666845
  hyper
  renal vs. ovary,bladder_and_urothelial

SEQ ID NO: 477101 - DNA, 218 bp, Homo sapiens; identical to SEQ ID NO: 345233
  chr6:37666866-37667084
  hyper
  renal vs. ovary,bladder_and_urothelial

SEQ ID NO: 477102 - DNA, 155 bp, Homo sapiens; identical to SEQ ID NO: 332786
  chr6:42947097-42947252
  hyper
  renal vs. liver_bileduct

SEQ ID NO: 477103 - DNA, 164 bp, Homo sapiens; identical to SEQ ID NO: 456082
  chr6:73329621-73329785
  hyper
  renal vs. lymphoid_neoplasm

SEQ ID NO: 477104 - DNA, 82 bp, Homo sapiens; identical to SEQ ID NO: 346833
  chr6:73330126-73330208
  hyper
  renal vs. lymphoid_neoplasm

SEQ ID NO: 477105 - DNA, 280 bp, Homo sapiens; identical to SEQ ID NO: 332855
  chr6:88678327-88678607
  hyper
  renal vs. ovary,uterine,prostate,breast,colorectal, thyroid,upper_gi,lung,pancreas_gallbladder,non_cancer, head_and_neck,bladder_and_urothelial,sarcoma

SEQ ID NO: 477106 - DNA, 42 bp, Homo sapiens; identical to SEQ ID NO: 459786
  chr6:91320244-91320286
  hyper
  renal vs. sarcoma,bladder_and_urothelial

SEQ ID NO: 477107 - DNA, 61 bp, Homo sapiens; identical to SEQ ID NO: 345244
  chr6:106443120-106443181
  hyper
  renal vs. sarcoma

SEQ ID NO: 477108 - DNA, 71 bp, Homo sapiens
  chr6:108435964-108436035
  hyper
  renal vs. myeloid_neoplasm
cggtttagtcatcattcctaataacaaggatgttgctaagaacagaaattttacatgattttcatacattc

SEQ ID NO: 477109 - DNA, 45 bp, Homo sapiens; identical to SEQ ID NO: 464733
  chr6:108484828-108484873
  hyper
  renal vs. non_cancer

SEQ ID NO: 477110 - DNA, 173 bp, Homo sapiens; identical to SEQ ID NO: 371353
  chr6:150312215-150312388
  hyper
  renal vs. non_cancer,thyroid

SEQ ID NO: 477111 - DNA, 29 bp, Homo sapiens
  chr7:6543023-6543052
  hyper
  renal vs. upper_gi
cggcccccgaaggcgcgcgggaccccagc

SEQ ID NO: 477112 - DNA, 237 bp, Homo sapiens; identical to SEQ ID NO: 358741
  chr7:6543240-6543477
  hyper
  renal vs. upper_gi

SEQ ID NO: 477113 - DNA, 62 bp, Homo sapiens; identical to SEQ ID NO: 463000
  chr7:6570393-6570455
  hyper
  renal vs. thyroid,ovary,non_cancer,uterine,prostate

SEQ ID NO: 477114 - DNA, 60 bp, Homo sapiens; identical to SEQ ID NO: 454474
  chr7:19156644-19156704
  hyper
  renal vs. sarcoma,melanoma,myeloid_neoplasm,uterine, prostate,ovary

SEQ ID NO: 477115 - DNA, 761 bp, Homo sapiens; identical to SEQ ID NO: 454479
  chr7:23510081-23510842
  hyper
  renal vs. colorectal,uterine

SEQ ID NO: 477116 - DNA, 59 bp, Homo sapiens; identical to SEQ ID NO: 350549
  chr7:27233098-27233157
  hyper
  renal vs. anorectal

SEQ ID NO: 477117 - DNA, 78 bp, Homo sapiens; identical to SEQ ID NO: 456132
  chr7:27281871-27281949
  hyper
  renal vs. multiple_myeloma

SEQ ID NO: 477118 - DNA, 7 bp, Homo sapiens
  chr7:37487365-37487372
  hyper
  renal vs. lymphoid_neoplasm
cgctcgc

SEQ ID NO: 477119 - DNA, 102 bp, Homo sapiens; identical to SEQ ID NO: 345274
  chr7:50344738-50344840
  hyper
  renal vs. anorectal,non_cancer,myeloid_neoplasm, lymphoid_neoplasm,multiple_myeloma,uterine,thyroid,ovary

SEQ ID NO: 477120 - DNA, 25 bp, Homo sapiens
  chr7:51383730-51383755
  hyper
  renal vs. liver_bileduct
cgggcaatccgaacaccttccgaga

SEQ ID NO: 477121 - DNA, 462 bp, Homo sapiens; identical to SEQ ID NO: 467658
  chr7:51383790-51384252
  hyper
  renal vs. liver_bileduct

SEQ ID NO: 477122 - DNA, 244 bp, Homo sapiens; identical to SEQ ID NO: 456139
  chr7:100167136-100167380
  hyper
  renal vs. cervical,pancreas_gallbladder

SEQ ID NO: 477123 - DNA, 240 bp, Homo sapiens; identical to SEQ ID NO: 456140
  chr7:100167621-100167861
  hyper
  renal vs. cervical,pancreas_gallbladder

SEQ ID NO: 477124 - DNA, 240 bp, Homo sapiens; identical to SEQ ID NO: 456140
  chr7:100167621-100167861
  hyper
  renal vs. pancreas_gallbladder,cervical,anorectal

SEQ ID NO: 477125 - DNA, 145 bp, Homo sapiens; identical to SEQ ID NO: 350625
  chr7:100168054-100168199
  hyper
  renal vs. pancreas_gallbladder,cervical,anorectal

SEQ ID NO: 477126 - DNA, 176 bp, Homo sapiens; identical to SEQ ID NO: 371652
  chr7:103086734-103086910
  hyper
  renal vs. ovary

SEQ ID NO: 477127 - DNA, 27 bp, Homo sapiens
  chr7:120970733-120970760
  hyper
  renal vs. ovary
cgcccttccgaaggagccctggtcccc

SEQ ID NO: 477128 - DNA, 198 bp, Homo sapiens; identical to SEQ ID NO: 463040
  chr7:139929854-139930052
  hyper
  renal vs. cervical,colorectal

SEQ ID NO: 477129 - DNA, 362 bp, Homo sapiens; identical to SEQ ID NO: 345285
  chr7:139930346-139930708
  hyper
  renal vs. cervical,colorectal

SEQ ID NO: 477130 - DNA, 200 bp, Homo sapiens
  chr7:149119398-149119598
  hyper
  renal vs. bladder_and_urothelial,pancreas_gallbladder
cggggctgcggccgggcggctcccgcactgcgactaagggccagccggctggcaggcggggctggggctcggatgtcgggactagcgggtctctggcgcgaggcggccgccaccaccgagaaggccgcgcgcattcctagagcggccgccagcggccaggtgagggcgccgcggcctccggggcctcctcgcctctggcc

SEQ ID NO: 477131 - DNA, 208 bp, Homo sapiens
  chr7:149119682-149119890
  hyper
  renal vs. bladder_and_urothelial,pancreas_gallbladder
ggcacccagcagcgcgctcccgttctcatcagacgggagaaaaaacgcccaggcagaggaacgtctaaaagtcaagtcatcaaaattaatgtaatcgagaaaatgtgcatatttaaaatatggatagagacgcataaatacatctttaaaataaaaatataatcgtttgtgttaagtccttgctccattggctctcagctgcactcac

SEQ ID NO: 477132 - DNA, 52 bp, Homo sapiens
  chr7:149120073-149120125
  hyper
  renal vs. bladder_and_urothelial,pancreas_gallbladder
gggccagaggcctggcttggggaagggccccttcccggttccccaaggtccc

SEQ ID NO: 477133 - DNA, 130 bp, Homo sapiens; identical to SEQ ID NO: 333354
  chr8:2970523-2970653
  hyper
  renal vs. bladder_and_urothelial

SEQ ID NO: 477134 - DNA, 209 bp, Homo sapiens
  chr8:9760527-9760736
  hyper
  renal vs. thyroid,ovary
cggaggaaggtgttgacccacatacaatgagtcctgagcccagagaaaaatctgcacacacaagcactccgcaatgcgctcccaggcgaccccctccccacgcacaccgcatctgtgctgcacagatctgcttctgtcacagaatcagcttctgtttctctccctgagtctgtttgcatctctaagcccctgtctgtcacaggctgcac

SEQ ID NO: 477135 - DNA, 219 bp, Homo sapiens
  chr8:9761155-9761374
  hyper
  renal vs. thyroid,ovary
cagcatcctccccgccgcagctcccccaatcacacagacaatgagataacagcgacgtcttccaaaggctctttgttctcccccatcctttcgcatccaggctttttcctgcaaagcggagggggtggagggatgggggtgtgggtggaagtgggagacggaggggtgcctcccccgtgttaattaccccggctcccctcgcccctttccccgcgcctc

SEQ ID NO: 477136 - DNA, 261 bp, Homo sapiens
  chr8:9761155-9761416
  hyper
  renal vs. thyroid
cagcatcctccccgccgcagctcccccaatcacacagacaatgagataacagcgacgtcttccaaaggctctttgttctcccccatcctttcgcatccaggctttttcctgcaaagcggagggggtggagggatgggggtgtgggtggaagtgggagacggaggggtgcctcccccgtgttaattaccccggctcccctcgcccctttccccgcgcctcgcctcccctgcagctccagacaatgaaaaaacaacatcgacc

SEQ ID NO: 477137 - DNA, 212 bp, Homo sapiens; identical to SEQ ID NO: 345302
  chr8:61193765-61193977
  hyper
  renal vs. ovary

SEQ ID NO: 477138 - DNA, 293 bp, Homo sapiens; identical to SEQ ID NO: 453456
  chr8:61193765-61194058
  hyper
  renal vs. upper_gi

SEQ ID NO: 477139 - DNA, 120 bp, Homo sapiens; identical to SEQ ID NO: 463057
  chr8:61822259-61822379
  hyper
  renal vs. ovary

SEQ ID NO: 477140 - DNA, 144 bp, Homo sapiens; identical to SEQ ID NO: 201426
  chr8:61822883-61823027
  hyper
  renal vs. ovary

SEQ ID NO: 477141 - DNA, 420 bp, Homo sapiens; identical to SEQ ID NO: 463069
  chr8:99956867-99957287
  hyper
  renal vs. upper_gi

SEQ ID NO: 477142 - DNA, 51 bp, Homo sapiens; identical to SEQ ID NO: 345310
  chr8:99957709-99957760
  hyper
  renal vs. upper_gi

SEQ ID NO: 477143 - DNA, 623 bp, Homo sapiens
  chr8:107669381-107670004
  hyper
  renal vs. liver_bileduct,uterine,cervical,sarcoma, colorectal,head_and_neck,upper_gi,ovary,anorectal, pancreas_gallbladder,breast,lung,thyroid,melanoma,prostate, non_cancer,multiple_myeloma,myeloid_neoplasm,
  CONT. FROM ABOVE: bladder_and_urothelial
cgcaaactaaatccctcaataacgttgcctaaacaggactgggatcatagaatgtccaacactaacatgagttcataatggcacaacgaacttaaaatgttactattcatgttttaattatgattgcagtcttacgttgaaggtatctccgccgtccttaaacataaaaaaaaaaaaaggaaatacaagctgcaaaagttttatgtaatgcactccaccctcttttttccccaagccaacacacacccttcaaactttttgacagttattttcagacccctcctaggctcccgaactccatgcaactccagcagtctcccctgggccatttttagcctctgctctgacctggcgggaggctgggtgtccaccctttcccctgcagtcctgaaagtccggtccgagcgcggacggggcggggaggggctgggcgggccaggccagctccattggcgccaggcgggtgggggaatgcgctgagaggacccgtccagcttgcttaaaagccatcagttttctgaccccgcatcggttccaggaagaatacacctatgtgacaagctaagttctgcctcattttgcatttagaagccacaagaaaaacttttcgaaaacttttgtcc

SEQ ID NO: 477144 - DNA, 271 bp, Homo sapiens
  chr8:107669733-107670004
  hyper
  renal vs. sarcoma,liver_bileduct,cervical,head_and_neck, ovary,anorectal,uterine,pancreas_gallbladder,colorectal, melanoma,upper_gi,bladder_and_urothelial,lung,thyroid,breast, multiple_myeloma,prostate,myeloid_neoplasm,non_cancer
cgggaggctgggtgtccaccctttcccctgcagtcctgaaagtccggtccgagcgcggacggggcggggaggggctgggcgggccaggccagctccattggcgccaggcgggtgggggaatgcgctgagaggacccgtccagcttgcttaaaagccatcagttttctgaccccgcatcggttccaggaagaatacacctatgtgacaagctaagttctgcctcattttgcatttagaagccacaagaaaaacttttcgaaaacttttgtcc

SEQ ID NO: 477145 - DNA, 412 bp, Homo sapiens
  chr8:107670289-107670701
  hyper
  renal vs. sarcoma,liver_bileduct,cervical,head_and_neck, ovary,anorectal,uterine,pancreas_gallbladder,colorectal, melanoma,upper_gi,bladder_and_urothelial,lung,thyroid,breast, multiple_myeloma,prostate,myeloid_neoplasm,non_cancer
gggggcggcggcgaagcccggcaggtgcgcttcgaagattacctgagggagccagcccagggggacctcgggtgcgggtccccgccccaccggcccccggcgccgtccagcccggagggacctggtgagcccacctttctttcgcctcccgcgcggccgacctgggctgagggctgtggggaggcggcggtcgtggcgccgggcgggggtcgctgcccggctctggcaggtgtgcctgggccggggcgggcaacgtggccggggtggcggccgccgggggcgaggaaggaaggactcgttcggctctggggagggaagactttcagctgcgtgccagctcttcctgctctgctcttcctgctttcctcacctagacttgattttctttccccgccaagtatttcaaggggac

SEQ ID NO: 477146 - DNA, 634 bp, Homo sapiens
  chr8:107670289-107670923
  hyper
  renal vs. cervical,bladder_and_urothelial,head_and_neck, ovary,anorectal,breast,uterine,colorectal,liver_bileduct, pancreas_gallbladder,melanoma,prostate,myeloid_neoplasm,thyroid, non_cancer,lung,upper_gi,multiple_myeloma,sarcoma
gggggcggcggcgaagcccggcaggtgcgcttcgaagattacctgagggagccagcccagggggacctcgggtgcgggtccccgccccaccggcccccggcgccgtccagcccggagggacctggtgagcccacctttctttcgcctcccgcgcggccgacctgggctgagggctgtggggaggcggcggtcgtggcgccgggcgggggtcgctgcccggctctggcaggtgtgcctgggccggggcgggcaacgtggccggggtggcggccgccgggggcgaggaaggaaggactcgttcggctctggggagggaagactttcagctgcgtgccagctcttcctgctctgctcttcctgctttcctcacctagacttgattttctttccccgccaagtatttcaaggggacgatccattctctctttccctcccactgggaggtgaagactgaaccagttatgacgtccgtgttttcagtcttggattcttgaagagcgctgtgcctgctttggttttggtttgggtcagtctttccttaatatttctcagttgttaggattcacttcctaaccgaaaaataaaaagccagatacttctttgtaaaataaaacacttcattaacattggaagc

SEQ ID NO: 477147 - DNA, 105 bp, Homo sapiens; identical to SEQ ID NO: 345314
  chr8:107670978-107671083
  hyper
  renal vs. cervical,bladder_and_urothelial,head_and_neck, ovary,anorectal,breast,uterine,colorectal,liver_bileduct, pancreas_gallbladder,melanoma,prostate,myeloid_neoplasm,thyroid, non_cancer,lung,upper_gi,multiple_myeloma,sarcoma

SEQ ID NO: 477148 - DNA, 238 bp, Homo sapiens; identical to SEQ ID NO: 463087
  chr9:37035890-37036128
  hyper
  renal vs. myeloid_neoplasm

SEQ ID NO: 477149 - DNA, 3 bp, Homo sapiens
  chr9:66494093-66494096
  hyper
  renal vs. breast
cgc

SEQ ID NO: 477150 - DNA, 349 bp, Homo sapiens; identical to SEQ ID NO: 333667
  chr9:71320587-71320936
  hyper
  renal vs. upper_gi

SEQ ID NO: 477151 - DNA, 202 bp, Homo sapiens; identical to SEQ ID NO: 453506
  chr9:100610480-100610682
  hyper
  renal vs. sarcoma

SEQ ID NO: 477152 - DNA, 442 bp, Homo sapiens; identical to SEQ ID NO: 475918
  chr9:102586203-102586645
  hyper
  renal vs. head_and_neck

SEQ ID NO: 477153 - DNA, 280 bp, Homo sapiens; identical to SEQ ID NO: 333801
  chr9:132145475-132145755
  hyper
  renal vs. liver_bileduct

SEQ ID NO: 477154 - DNA, 637 bp, Homo sapiens; identical to SEQ ID NO: 475929
  chr9:140196486-140197123
  hyper
  renal vs. ovary,cervical,uterine

SEQ ID NO: 477155 - DNA, 155 bp, Homo sapiens; identical to SEQ ID NO: 347067
  chr9:140197263-140197418
  hyper
  renal vs. ovary,cervical,uterine

SEQ ID NO: 477156 - DNA, 90 bp, Homo sapiens; identical to SEQ ID NO: 454526
  chrY:2655227-2655317
  hyper
  renal vs. ovary,uterine,breast,cervical

SEQ ID NO: 477157 - DNA, 596 bp, Homo sapiens; identical to SEQ ID NO: 345675
  chrY:2655346-2655942
  hyper
  renal vs. ovary,uterine,breast,cervical

SEQ ID NO: 477158 - DNA, 461 bp, Homo sapiens; identical to SEQ ID NO: 345677
  chrY:15863654-15864115
  hyper
  renal vs. ovary,breast

SEQ ID NO: 477159 - DNA, 74 bp, Homo sapiens; identical to SEQ ID NO: 454528
  chrY:16635744-16635818
  hyper
  renal vs. ovary,uterine,breast,cervical

SEQ ID NO: 477160 - DNA, 624 bp, Homo sapiens; identical to SEQ ID NO: 454529
  chrY:16636060-16636684
  hyper
  renal vs. ovary,uterine,breast,cervical

SEQ ID NO: 477161 - DNA, 949 bp, Homo sapiens; identical to SEQ ID NO: 454530
  chrY:16636193-16637142
  hyper
  renal vs. ovary,uterine,breast,cervical

SEQ ID NO: 477162 - DNA, 4 bp, Homo sapiens
  JH636052.4:5118715-5118719
  hyper
  renal vs. multiple_myeloma
cgcc

SEQ ID NO: 477163 - DNA, 189 bp, Homo sapiens; identical to SEQ ID NO: 336763
  chr1:1200473-1200662
  hypo
  renal vs. ovary,upper_gi,head_and_neck,multiple_myeloma, uterine,prostate,bladder_and_urothelial,colorectal

SEQ ID NO: 477164 - DNA, 549 bp, Homo sapiens; identical to SEQ ID NO: 362227
  chr1:2025644-2026193
  hypo
  renal vs. upper_gi,liver_bileduct,lung,head_and_neck, breast

SEQ ID NO: 477165 - DNA, 33 bp, Homo sapiens
  chr1:6284796-6284829
  hypo
  renal vs. head_and_neck,myeloid_neoplasm,anorectal, multiple_myeloma,bladder_and_urothelial,lymphoid_neoplasm, prostate,melanoma,breast,uterine,cervical
cgagtcctggttatcctttacttacactctggc

SEQ ID NO: 477166 - DNA, 280 bp, Homo sapiens; identical to SEQ ID NO: 352770
  chr1:6284858-6285138
  hypo
  renal vs. head_and_neck,myeloid_neoplasm,anorectal, multiple_myeloma,bladder_and_urothelial,lymphoid_neoplasm, prostate,melanoma,breast,uterine,cervical

SEQ ID NO: 477167 - DNA, 362 bp, Homo sapiens; identical to SEQ ID NO: 336882
  chr1:6333795-6334157
  hypo
  renal vs. anorectal

SEQ ID NO: 477168 - DNA, 304 bp, Homo sapiens; identical to SEQ ID NO: 336883
  chr1:6345513-6345817
  hypo
  renal vs. melanoma

SEQ ID NO: 477169 - DNA, 318 bp, Homo sapiens; identical to SEQ ID NO: 336889
  chr1:6711983-6712301
  hypo
  renal vs. liver_bileduct,head_and_neck,colorectal, lymphoid_neoplasm,melanoma,bladder_and_urothelial,prostate, upper_gi,pancreas_gallbladder

SEQ ID NO: 477170 - DNA, 107 bp, Homo sapiens; identical to SEQ ID NO: 472631
  chr1:6713808-6713915
  hypo
  renal vs. lymphoid_neoplasm,head_and_neck,anorectal, colorectal,prostate,upper_gi,pancreas_gallbladder,sarcoma, bladder_and_urothelial,cervical,lung,breast,non_cancer, liver_bileduct,myeloid_neoplasm,multiple_myeloma

SEQ ID NO: 477171 - DNA, 308 bp, Homo sapiens; identical to SEQ ID NO: 472632
  chr1:6714041-6714349
  hypo
  renal vs. lymphoid_neoplasm,head_and_neck,anorectal, colorectal,prostate,upper_gi,pancreas_gallbladder,sarcoma, bladder_and_urothelial,cervical,lung,breast,non_cancer, liver_bileduct,myeloid_neoplasm,multiple_myeloma

SEQ ID NO: 477172 - DNA, 105 bp, Homo sapiens; identical to SEQ ID NO: 336891
  chr1:6738127-6738232
  hypo
  renal vs. lung,upper_gi,liver_bileduct,ovary, pancreas_gallbladder,uterine,lymphoid_neoplasm, bladder_and_urothelial,cervical,colorectal,head_and_neck,breast, multiple_myeloma,anorectal,melanoma,sarcoma

SEQ ID NO: 477173 - DNA, 115 bp, Homo sapiens; identical to SEQ ID NO: 352777
  chr1:6750362-6750477
  hypo
  renal vs. lymphoid_neoplasm,liver_bileduct,cervical, pancreas_gallbladder,prostate,melanoma,upper_gi,head_and_neck, colorectal,uterine,anorectal,multiple_myeloma,non_cancer, myeloid_neoplasm

SEQ ID NO: 477174 - DNA, 426 bp, Homo sapiens; identical to SEQ ID NO: 457245
  chr1:9711649-9712075
  hypo
  renal vs. lymphoid_neoplasm,sarcoma,prostate, myeloid_neoplasm,non_cancer,thyroid,multiple_myeloma

SEQ ID NO: 477175 - DNA, 64 bp, Homo sapiens; identical to SEQ ID NO: 346318
  chr1:12123950-12124014
  hypo
  renal vs. thyroid,lymphoid_neoplasm,multiple_myeloma, non_cancer

SEQ ID NO: 477176 - DNA, 517 bp, Homo sapiens; identical to SEQ ID NO: 455503
  chr1:12226892-12227409
  hypo
  renal vs. ovary

SEQ ID NO: 477177 - DNA, 207 bp, Homo sapiens; identical to SEQ ID NO: 455504
  chr1:12227438-12227645
  hypo
  renal vs. ovary

SEQ ID NO: 477178 - DNA, 247 bp, Homo sapiens; identical to SEQ ID NO: 455505
  chr1:12227162-12227409
  hypo
  renal vs. ovary,cervical

SEQ ID NO: 477179 - DNA, 207 bp, Homo sapiens; identical to SEQ ID NO: 455504
  chr1:12227438-12227645
  hypo
  renal vs. ovary,cervical

SEQ ID NO: 477180 - DNA, 3 bp, Homo sapiens
  chr1:14027196-14027199
  hypo
  renal vs. lymphoid_neoplasm,ovary,uterine,anorectal, multiple_myeloma,head_and_neck,breast,non_cancer, myeloid_neoplasm,prostate,lung,cervical,bladder_and_urothelial, colorectal,thyroid,melanoma
gcc

SEQ ID NO: 477181 - DNA, 167 bp, Homo sapiens; identical to SEQ ID NO: 336940
  chr1:15178306-15178473
  hypo

SEQ ID NO: 477182 - DNA, 132 bp, Homo sapiens; identical to SEQ ID NO: 336957
  chr1:19436878-19437010
  hypo
  renal vs. upper_gi,anorectal,liver_bileduct,lung, melanoma,breast

SEQ ID NO: 477183 - DNA, 110 bp, Homo sapiens; identical to SEQ ID NO: 336963
  chr1:19767182-19767292
  hypo
  renal vs. multiple_myeloma,myeloid_neoplasm,prostate

SEQ ID NO: 477184 - DNA, 156 bp, Homo sapiens
  chr1:24434944-24435100
  hypo
  renal vs. head_and_neck
cggggaccctgtggctcccacctgctgcggaaggtccgcctccgcacagaggagcccatgcgcaggctgtgctgccgctcctccttctgctcctcctcctgccggtgctccagcctgtgaacctccatggcctgggggggccgggggtcccccgca

SEQ ID NO: 477185 - DNA, 38 bp, Homo sapiens; identical to SEQ ID NO: 362400
  chr1:24435146-24435184
  hypo
  renal vs. head_and_neck

SEQ ID NO: 477186 - DNA, 33 bp, Homo sapiens; identical to SEQ ID NO: 454089
  chr1:25255579-25255612
  hypo
  renal vs. lymphoid_neoplasm,cervical,myeloid_neoplasm

SEQ ID NO: 477187 - DNA, 7 bp, Homo sapiens
  chr1:25255934-25255941
  hypo
  renal vs. lymphoid_neoplasm,cervical,myeloid_neoplasm
agccaga

SEQ ID NO: 477188 - DNA, 211 bp, Homo sapiens; identical to SEQ ID NO: 336987
  chr1:26087011-26087222
  hypo
  renal vs. melanoma

SEQ ID NO: 477189 - DNA, 261 bp, Homo sapiens; identical to SEQ ID NO: 375749
  chr1:27875550-27875811
  hypo
  renal vs. liver_bileduct

SEQ ID NO: 477190 - DNA, 238 bp, Homo sapiens; identical to SEQ ID NO: 474473
  chr1:27875852-27876090
  hypo
  renal vs. cervical,head_and_neck,melanoma, lymphoid_neoplasm,thyroid,anorectal,prostate,breast,uterine, lung

SEQ ID NO: 477191 - DNA, 111 bp, Homo sapiens; identical to SEQ ID NO: 296950
  chr1:27876333-27876444
  hypo
  renal vs. cervical,head_and_neck,melanoma, lymphoid_neoplasm,thyroid,anorectal,prostate,breast,uterine, lung

SEQ ID NO: 477192 - DNA, 63 bp, Homo sapiens; identical to SEQ ID NO: 476626
  chr1:39043982-39044045
  hypo
  renal vs. ovary,myeloid_neoplasm,sarcoma, multiple_myeloma,thyroid

SEQ ID NO: 477193 - DNA, 66 bp, Homo sapiens; identical to SEQ ID NO: 356738
  chr1:39044466-39044532
  hypo
  renal vs. ovary,myeloid_neoplasm,sarcoma, multiple_myeloma,thyroid

SEQ ID NO: 477194 - DNA, 166 bp, Homo sapiens; identical to SEQ ID NO: 337039
  chr1:43310153-43310319
  hypo
  renal vs. pancreas_gallbladder

SEQ ID NO: 477195 - DNA, 428 bp, Homo sapiens; identical to SEQ ID NO: 337069
  chr1:48459812-48460240
  hypo
  renal vs. pancreas_gallbladder,prostate,uterine, anorectal,breast,colorectal,upper_gi,liver_bileduct,thyroid, head_and_neck,non_cancer,lymphoid_neoplasm,cervical, bladder_and_urothelial

SEQ ID NO: 477196 - DNA, 32 bp, Homo sapiens; identical to SEQ ID NO: 375831
  chr1:54694462-54694494
  hypo
  renal vs. head_and_neck

SEQ ID NO: 477197 - DNA, 148 bp, Homo sapiens; identical to SEQ ID NO: 337089
  chr1:55066953-55067101
  hypo
  renal vs. head_and_neck,pancreas_gallbladder,upper_gi, breast,bladder_and_urothelial,colorectal,liver_bileduct, anorectal,lung

SEQ ID NO: 477198 - DNA, 536 bp, Homo sapiens; identical to SEQ ID NO: 462227
  chr1:85462747-85463283
  hypo
  renal vs. uterine

SEQ ID NO: 477199 - DNA, 113 bp, Homo sapiens; identical to SEQ ID NO: 349296
  chr1:109204221-109204334
  hypo
  renal vs. cervical,multiple_myeloma,non_cancer

SEQ ID NO: 477200 - DNA, 229 bp, Homo sapiens; identical to SEQ ID NO: 337133
  chr1:110170726-110170955
  hypo
  renal vs. head_and_neck,colorectal,breast, pancreas_gallbladder,upper_gi,bladder_and_urothelial,lung, prostate,uterine,melanoma,cervical,anorectal,non_cancer,sarcoma, myeloid_neoplasm,lymphoid_neoplasm,liver_bileduct,ovary

SEQ ID NO: 477201 - DNA, 144 bp, Homo sapiens; identical to SEQ ID NO: 337154
  chr1:117918966-117919110
  hypo
  renal vs. liver_bileduct,lymphoid_neoplasm,head_and_neck, upper_gi,pancreas_gallbladder,bladder_and_urothelial,anorectal, multiple_myeloma,prostate

SEQ ID NO: 477202 - DNA, 245 bp, Homo sapiens; identical to SEQ ID NO: 462256
  chr1:154474305-154474550
  hypo
  renal vs. ovary

SEQ ID NO: 477203 - DNA, 73 bp, Homo sapiens; identical to SEQ ID NO: 337219
  chr1:165711421-165711494
  hypo
  renal vs. pancreas_gallbladder,lung

SEQ ID NO: 477204 - DNA, 39 bp, Homo sapiens; identical to SEQ ID NO: 337229
  chr1:169096476-169096515
  hypo
  renal vs. melanoma

SEQ ID NO: 477205 - DNA, 181 bp, Homo sapiens; identical to SEQ ID NO: 337233
  chr1:171570080-171570261
  hypo
  renal vs. sarcoma,melanoma,liver_bileduct, pancreas_gallbladder,colorectal,lymphoid_neoplasm,upper_gi,lung, bladder_and_urothelial,breast,cervical,prostate, multiple_myeloma

SEQ ID NO: 477206 - DNA, 153 bp, Homo sapiens; identical to SEQ ID NO: 454589
  chr1:175375048-175375201
  hypo
  renal vs. anorectal,non_cancer,lymphoid_neoplasm, myeloid_neoplasm,cervical

SEQ ID NO: 477207 - DNA, 111 bp, Homo sapiens; identical to SEQ ID NO: 337242
  chr1:175957595-175957706
  hypo
  renal vs. liver_bileduct,pancreas_gallbladder,upper_gi, cervical,sarcoma,lung,colorectal,uterine,lymphoid_neoplasm, bladder_and_urothelial,breast

SEQ ID NO: 477208 - DNA, 44 bp, Homo sapiens; identical to SEQ ID NO: 337271
  chr1:202009839-202009883
  hypo
  renal vs. lung,upper_gi,sarcoma,prostate,melanoma, colorectal,breast,bladder_and_urothelial,pancreas_gallbladder, cervical,lymphoid_neoplasm,myeloid_neoplasm,non_cancer, liver_bileduct,multiple_myeloma,uterine,thyroid

SEQ ID NO: 477209 - DNA, 29 bp, Homo sapiens
  chr1:208084683-208084712
  hypo
  renal vs. multiple_myeloma
tggaggtttgttcgggctccagatgcctc

SEQ ID NO: 477210 - DNA, 456 bp, Homo sapiens; identical to SEQ ID NO: 337312
  chr1:213030005-213030461
  hypo
  renal vs. cervical,head_and_neck,pancreas_gallbladder, anorectal

SEQ ID NO: 477211 - DNA, 234 bp, Homo sapiens; identical to SEQ ID NO: 337326
  chr1:224345162-224345396
  hypo
  renal vs. liver_bileduct,pancreas_gallbladder,upper_gi, ovary,lung,head_and_neck,bladder_and_urothelial,colorectal, lymphoid_neoplasm,uterine,breast,cervical,melanoma

SEQ ID NO: 477212 - DNA, 380 bp, Homo sapiens; identical to SEQ ID NO: 337330
  chr1:225597858-225598238
  hypo
  renal vs. pancreas_gallbladder,liver_bileduct,upper_gi, bladder_and_urothelial,head_and_neck,lung,colorectal,breast

SEQ ID NO: 477213 - DNA, 917 bp, Homo sapiens; identical to SEQ ID NO: 462280
  chr1:226925659-226926576
  hypo
  renal vs. ovary

SEQ ID NO: 477214 - DNA, 273 bp, Homo sapiens; identical to SEQ ID NO: 337366
  chr1:230256241-230256514
  hypo
  renal vs. uterine,anorectal,upper_gi,thyroid, liver_bileduct,colorectal,lung,non_cancer,prostate, lymphoid_neoplasm,head_and_neck,bladder_and_urothelial, myeloid_neoplasm,multiple_myeloma,pancreas_gallbladder,breast,
  CONT. FROM ABOVE: cervical,sarcoma

SEQ ID NO: 477215 - DNA, 262 bp, Homo sapiens; identical to SEQ ID NO: 337367
  chr1:230266303-230266565
  hypo
  renal vs. sarcoma,liver_bileduct,melanoma,cervical, anorectal,pancreas_gallbladder,breast,myeloid_neoplasm, non_cancer,prostate

SEQ ID NO: 477216 - DNA, 588 bp, Homo sapiens; identical to SEQ ID NO: 455574
  chr1:231175062-231175650
  hypo
  renal vs. ovary,colorectal,melanoma,anorectal

SEQ ID NO: 477217 - DNA, 286 bp, Homo sapiens; identical to SEQ ID NO: 455575
  chr1:231175692-231175978
  hypo
  renal vs. ovary,colorectal,melanoma,anorectal

SEQ ID NO: 477218 - DNA, 166 bp, Homo sapiens; identical to SEQ ID NO: 455576
  chr1:231175484-231175650
  hypo
  renal vs. ovary,colorectal

SEQ ID NO: 477219 - DNA, 709 bp, Homo sapiens; identical to SEQ ID NO: 349428
  chr1:231175692-231176401
  hypo
  renal vs. ovary,colorectal

SEQ ID NO: 477220 - DNA, 32 bp, Homo sapiens; identical to SEQ ID NO: 353007
  chr1:235872558-235872590
  hypo
  renal vs. prostate,breast,melanoma,thyroid, bladder_and_urothelial,lymphoid_neoplasm,uterine,head_and_neck, anorectal,ovary

SEQ ID NO: 477221 - DNA, 209 bp, Homo sapiens; identical to SEQ ID NO: 337441
  chr1:247348636-247348845
  hypo
  renal vs. lymphoid_neoplasm,uterine,cervical, liver_bileduct,head_and_neck

SEQ ID NO: 477222 - DNA, 479 bp, Homo sapiens; identical to SEQ ID NO: 340504
  chr10:425893-426372
  hypo
  renal vs. pancreas_gallbladder,lymphoid_neoplasm, bladder_and_urothelial,colorectal,breast,lung,uterine,melanoma, cervical

SEQ ID NO: 477223 - DNA, 162 bp, Homo sapiens; identical to SEQ ID NO: 459976
  chr10:3160827-3160989
  hypo
  renal vs. lymphoid_neoplasm

SEQ ID NO: 477224 - DNA, 125 bp, Homo sapiens; identical to SEQ ID NO: 354487
  chr10:3161171-3161296
  hypo
  renal vs. lymphoid_neoplasm

SEQ ID NO: 477225 - DNA, 60 bp, Homo sapiens; identical to SEQ ID NO: 340572
  chr10:13711305-13711365
  hypo
  renal vs. head_and_neck,lymphoid_neoplasm

SEQ ID NO: 477226 - DNA, 411 bp, Homo sapiens; identical to SEQ ID NO: 340577
  chr10:14816098-14816509
  hypo
  renal vs. lymphoid_neoplasm,sarcoma,cervical,breast, prostate,thyroid,head_and_neck,colorectal,upper_gi,lung, bladder_and_urothelial,non_cancer,uterine,melanoma, pancreas_gallbladder,anorectal,liver_bileduct

SEQ ID NO: 477227 - DNA, 105 bp, Homo sapiens; identical to SEQ ID NO: 365329
  chr10:31134746-31134851
  hypo
  renal vs. pancreas_gallbladder,melanoma, bladder_and_urothelial

SEQ ID NO: 477228 - DNA, 68 bp, Homo sapiens; identical to SEQ ID NO: 340623
  chr10:35043989-35044057
  hypo
  renal vs. head_and_neck,sarcoma

SEQ ID NO: 477229 - DNA, 217 bp, Homo sapiens; identical to SEQ ID NO: 354546
  chr10:44163386-44163603
  hypo
  renal vs. pancreas_gallbladder,anorectal,sarcoma,breast, bladder_and_urothelial,upper_gi,cervical

SEQ ID NO: 477230 - DNA, 74 bp, Homo sapiens
  chr10:44163716-44163790
  hypo
  renal vs. sarcoma
cggctcactgcagcctccgcacctccgactccagcgatcagattcgcctgggttgtccagctttcaagtccacc

SEQ ID NO: 477231 - DNA, 238 bp, Homo sapiens; identical to SEQ ID NO: 340659
  chr10:73514960-73515198
  hypo
  renal vs. sarcoma

SEQ ID NO: 477232 - DNA, 499 bp, Homo sapiens; identical to SEQ ID NO: 340677
  chr10:79601557-79602056
  hypo
  renal vs. liver_bileduct,pancreas_gallbladder,upper_gi

SEQ ID NO: 477233 - DNA, 57 bp, Homo sapiens; identical to SEQ ID NO: 345362
  chr10:93647662-93647719
  hypo
  renal vs. ovary,uterine,anorectal,non_cancer

SEQ ID NO: 477234 - DNA, 141 bp, Homo sapiens; identical to SEQ ID NO: 340725
  chr10:103372842-103372983
  hypo
  renal vs. liver_bileduct,upper_gi

SEQ ID NO: 477235 - DNA, 261 bp, Homo sapiens; identical to SEQ ID NO: 340776
  chr10:126767714-126767975
  hypo
  renal vs. myeloid_neoplasm,melanoma,lung,head_and_neck, lymphoid_neoplasm,sarcoma,cervical

SEQ ID NO: 477236 - DNA, 549 bp, Homo sapiens; identical to SEQ ID NO: 340777
  chr10:126771776-126772325
  hypo
  renal vs. melanoma,upper_gi,cervical, pancreas_gallbladder,colorectal,uterine,breast,prostate, head_and_neck

SEQ ID NO: 477237 - DNA, 514 bp, Homo sapiens; identical to SEQ ID NO: 340870
  chr10:135120335-135120849
  hypo
  renal vs. bladder_and_urothelial,liver_bileduct,melanoma, lung,pancreas_gallbladder,breast,head_and_neck,prostate,thyroid, sarcoma,cervical,anorectal,colorectal,non_cancer,upper_gi, uterine,myeloid_neoplasm,multiple_myeloma

SEQ ID NO: 477238 - DNA, 38 bp, Homo sapiens
  chr11:567195-567233
  hypo
  renal vs. melanoma,breast,anorectal,prostate, multiple_myeloma,lymphoid_neoplasm,thyroid,non_cancer,sarcoma, cervical
cgggcagagggcagagccaggctgtatcgaggggcggc

SEQ ID NO: 477239 - DNA, 48 bp, Homo sapiens; identical to SEQ ID NO: 354651
  chr11:567262-567310
  hypo
  renal vs. melanoma,breast,anorectal,prostate, multiple_myeloma,lymphoid_neoplasm,thyroid,non_cancer,sarcoma, cervical

SEQ ID NO: 477240 - DNA, 364 bp, Homo sapiens; identical to SEQ ID NO: 340894
  chr11:799220-799584
  hypo
  renal vs. pancreas_gallbladder,liver_bileduct,upper_gi, lung,head_and_neck

SEQ ID NO: 477241 - DNA, 305 bp, Homo sapiens; identical to SEQ ID NO: 365547
  chr11:799826-800131
  hypo
  renal vs. liver_bileduct

SEQ ID NO: 477242 - DNA, 4 bp, Homo sapiens
  chr11:862613-862617
  hypo
  renal vs. thyroid,myeloid_neoplasm
cgct

SEQ ID NO: 477243 - DNA, 706 bp, Homo sapiens; identical to SEQ ID NO: 474530
  chr11:1535842-1536548
  hypo
  renal vs. cervical,melanoma,breast

SEQ ID NO: 477244 - DNA, 95 bp, Homo sapiens; identical to SEQ ID NO: 365576
  chr11:1536583-1536678
  hypo
  renal vs. cervical,melanoma,breast

SEQ ID NO: 477245 - DNA, 47 bp, Homo sapiens; identical to SEQ ID NO: 340932
  chr11:1919487-1919534
  hypo
  renal vs. pancreas_gallbladder

SEQ ID NO: 477246 - DNA, 130 bp, Homo sapiens; identical to SEQ ID NO: 340956
  chr11:3035029-3035159
  hypo
  renal vs. sarcoma

SEQ ID NO: 477247 - DNA, 126 bp, Homo sapiens; identical to SEQ ID NO: 340974
  chr11:8255472-8255598
  hypo
  renal vs. lymphoid_neoplasm,melanoma,myeloid_neoplasm

SEQ ID NO: 477248 - DNA, 129 bp, Homo sapiens; identical to SEQ ID NO: 351149
  chr11:8615887-8616016
  hypo
  renal vs. ovary

SEQ ID NO: 477249 - DNA, 302 bp, Homo sapiens; identical to SEQ ID NO: 341016
  chr11:30445742-30446044
  hypo
  renal vs. melanoma

SEQ ID NO: 477250 - DNA, 805 bp, Homo sapiens; identical to SEQ ID NO: 334233
  chr11:33397688-33398493
  hypo
  renal vs. ovary

SEQ ID NO: 477251 - DNA, 324 bp, Homo sapiens; identical to SEQ ID NO: 372695
  chr11:33890633-33890957
  hypo
  renal vs. uterine

SEQ ID NO: 477252 - DNA, 118 bp, Homo sapiens; identical to SEQ ID NO: 341032
  chr11:36245106-36245224
  hypo
  renal vs. melanoma

SEQ ID NO: 477253 - DNA, 316 bp, Homo sapiens; identical to SEQ ID NO: 462351
  chr11:61276101-61276417
  hypo
  renal vs. thyroid,uterine,prostate,breast

SEQ ID NO: 477254 - DNA, 374 bp, Homo sapiens; identical to SEQ ID NO: 341095
  chr11:63908860-63909234
  hypo
  renal vs. head_and_neck,melanoma

SEQ ID NO: 477255 - DNA, 167 bp, Homo sapiens; identical to SEQ ID NO: 346030
  chr11:65685172-65685339
  hypo
  renal vs. anorectal,myeloid_neoplasm,prostate,colorectal, multiple_myeloma

SEQ ID NO: 477256 - DNA, 801 bp, Homo sapiens; identical to SEQ ID NO: 345395
  chr11:66079395-66080196
  hypo
  renal vs. upper_gi,pancreas_gallbladder,cervical,uterine, bladder_and_urothelial,colorectal,myeloid_neoplasm,thyroid, ovary,non_cancer,prostate,lung,head_and_neck

SEQ ID NO: 477257 - DNA, 796 bp, Homo sapiens; identical to SEQ ID NO: 455617
  chr11:66079700-66080496
  hypo
  renal vs. pancreas_gallbladder,upper_gi,colorectal,ovary, cervical,bladder_and_urothelial,melanoma,uterine,lung, non_cancer,anorectal,myeloid_neoplasm,prostate,thyroid

SEQ ID NO: 477258 - DNA, 33 bp, Homo sapiens
  chr11:66658557-66658590
  hypo
  renal vs. liver_bileduct
cgctctgtcgcccaagcttgagtgcagtggcgc

SEQ ID NO: 477259 - DNA, 260 bp, Homo sapiens; identical to SEQ ID NO: 341153
  chr11:68822128-68822388
  hypo
  renal vs. liver_bileduct,breast

SEQ ID NO: 477260 - DNA, 255 bp, Homo sapiens; identical to SEQ ID NO: 341166
  chr11:70054500-70054755
  hypo
  renal vs. liver_bileduct,lymphoid_neoplasm,breast, uterine,melanoma

SEQ ID NO: 477261 - DNA, 130 bp, Homo sapiens; identical to SEQ ID NO: 365759
  chr11:70189848-70189978
  hypo
  renal vs. upper_gi

SEQ ID NO: 477262 - DNA, 103 bp, Homo sapiens; identical to SEQ ID NO: 359903
  chr11:75380110-75380213
  hypo
  renal vs. thyroid

SEQ ID NO: 477263 - DNA, 40 bp, Homo sapiens; identical to SEQ ID NO: 341199
  chr11:76164370-76164410
  hypo
  renal vs. lymphoid_neoplasm,cervical,head_and_neck, breast,thyroid,pancreas_gallbladder,prostate,liver_bileduct, lung,uterine

SEQ ID NO: 477264 - DNA, 510 bp, Homo sapiens; identical to SEQ ID NO: 452797
  chr11:76381512-76382022
  hypo
  renal vs. multiple_myeloma

SEQ ID NO: 477265 - DNA, 30 bp, Homo sapiens; identical to SEQ ID NO: 452798
  chr11:76382264-76382294
  hypo
  renal vs. multiple_myeloma

SEQ ID NO: 477266 - DNA, 51 bp, Homo sapiens; identical to SEQ ID NO: 341212
  chr11:93425646-93425697
  hypo
  renal vs. bladder_and_urothelial,lymphoid_neoplasm, sarcoma,melanoma,breast,head_and_neck,thyroid,colorectal, uterine,cervical

SEQ ID NO: 477267 - DNA, 120 bp, Homo sapiens
  chr11:93476562-93476682
  hypo
  renal vs. cervical
cgtgggtcttgcggctgcggtgcctcacttacttagcccacggctctcaactcctcgcgggagggggggcgcgagtgaatgaggcgggaactggagtgctggaagccacgaactccagtc

SEQ ID NO: 477268 - DNA, 179 bp, Homo sapiens; identical to SEQ ID NO: 379865
  chr11:93476769-93476948
  hypo
  renal vs. cervical

SEQ ID NO: 477269 - DNA, 70 bp, Homo sapiens
  chr11:107931221-107931291
  hypo
  renal vs. uterine,bladder_and_urothelial, pancreas_gallbladder,multiple_myeloma,lymphoid_neoplasm, head_and_neck,ovary,colorectal,upper_gi,lung,breast,prostate, anorectal,sarcoma,liver_bileduct,cervical,non_cancer,thyroid,
  CONT. FROM ABOVE: myeloid_neoplasm,melanoma
cgaaatttgagcgaggtagaaataattatgcaaattgaataccactaaaagaagaatctggctggatgcc

SEQ ID NO: 477270 - DNA, 121 bp, Homo sapiens; identical to SEQ ID NO: 341236
  chr11:116821500-116821621
  hypo
  renal vs. liver_bileduct

SEQ ID NO: 477271 - DNA, 257 bp, Homo sapiens; identical to SEQ ID NO: 341244
  chr11:119290824-119291081
  hypo
  renal vs. breast,head_and_neck,cervical

SEQ ID NO: 477272 - DNA, 72 bp, Homo sapiens; identical to SEQ ID NO: 341326
  chr12:2995019-2995091
  hypo
  renal vs. liver_bileduct,pancreas_gallbladder,lung

SEQ ID NO: 477273 - DNA, 86 bp, Homo sapiens; identical to SEQ ID NO: 452813
  chr12:4377809-4377895
  hypo
  renal vs. lymphoid_neoplasm

SEQ ID NO: 477274 - DNA, 142 bp, Homo sapiens; identical to SEQ ID NO: 452814
  chr12:4378558-4378700
  hypo
  renal vs. lymphoid_neoplasm

SEQ ID NO: 477275 - DNA, 88 bp, Homo sapiens; identical to SEQ ID NO: 454142
  chr12:4378715-4378803
  hypo
  renal vs. colorectal

SEQ ID NO: 477276 - DNA, 285 bp, Homo sapiens; identical to SEQ ID NO: 455642
  chr12:4380196-4380481
  hypo
  renal vs. colorectal,ovary

SEQ ID NO: 477277 - DNA, 182 bp, Homo sapiens; identical to SEQ ID NO: 341338
  chr12:4672181-4672363
  hypo
  renal vs. melanoma,colorectal,prostate

SEQ ID NO: 477278 - DNA, 46 bp, Homo sapiens
  chr12:25344059-25344105
  hypo
  renal vs. pancreas_gallbladder,breast,uterine, lymphoid_neoplasm,head_and_neck,lung,prostate,cervical,upper_gi, melanoma,liver_bileduct,anorectal,bladder_and_urothelial,ovary, colorectal
cgcaaagtagcctcacacggtggctcactcctgtaatagcattcgc

SEQ ID NO: 477279 - DNA, 494 bp, Homo sapiens; identical to SEQ ID NO: 457433
  chr12:48576976-48577470
  hypo
  renal vs. sarcoma,ovary,anorectal,non_cancer, bladder_and_urothelial,myeloid_neoplasm,multiple_myeloma, thyroid,uterine,lung

SEQ ID NO: 477280 - DNA, 409 bp, Homo sapiens; identical to SEQ ID NO: 457434
  chr12:48577061-48577470
  hypo
  renal vs. sarcoma,anorectal,non_cancer,thyroid

SEQ ID NO: 477281 - DNA, 419 bp, Homo sapiens; identical to SEQ ID NO: 334517
  chr12:49931623-49932042
  hypo
  renal vs. pancreas_gallbladder

SEQ ID NO: 477282 - DNA, 58 bp, Homo sapiens; identical to SEQ ID NO: 455665
  chr12:54144782-54144840
  hypo
  renal vs. ovary

SEQ ID NO: 477283 - DNA, 572 bp, Homo sapiens; identical to SEQ ID NO: 476731
  chr12:54426536-54427108
  hypo
  renal vs. pancreas_gallbladder

SEQ ID NO: 477284 - DNA, 24 bp, Homo sapiens
  chr12:54427307-54427331
  hypo
  renal vs. pancreas_gallbladder
accggccccgccacagatttaccc

SEQ ID NO: 477285 - DNA, 206 bp, Homo sapiens; identical to SEQ ID NO: 476733
  chr12:54426902-54427108
  hypo
  renal vs. ovary,uterine,anorectal,upper_gi, pancreas_gallbladder,cervical

SEQ ID NO: 477286 - DNA, 330 bp, Homo sapiens; identical to SEQ ID NO: 476734
  chr12:54427307-54427637
  hypo
  renal vs. ovary,uterine,anorectal,upper_gi, pancreas_gallbladder,cervical

SEQ ID NO: 477287 - DNA, 279 bp, Homo sapiens; identical to SEQ ID NO: 476735
  chr12:54427358-54427637
  hypo
  renal vs. ovary,uterine,bladder_and_urothelial, myeloid_neoplasm,pancreas_gallbladder,upper_gi,melanoma, prostate,colorectal,sarcoma,breast,non_cancer,cervical,thyroid, multiple_myeloma,head_and_neck

SEQ ID NO: 477288 - DNA, 360 bp, Homo sapiens; identical to SEQ ID NO: 472805
  chr12:56558022-56558382
  hypo
  renal vs. liver_bileduct,anorectal,lung

SEQ ID NO: 477289 - DNA, 172 bp, Homo sapiens; identical to SEQ ID NO: 341440
  chr12:57625988-57626160
  hypo
  renal vs. cervical,bladder_and_urothelial,melanoma, upper_gi,colorectal,breast,lung,liver_bileduct, pancreas_gallbladder,ovary,uterine,myeloid_neoplasm

SEQ ID NO: 477290 - DNA, 55 bp, Homo sapiens; identical to SEQ ID NO: 365994
  chr12:72165436-72165491
  hypo
  renal vs. bladder_and_urothelial

SEQ ID NO: 477291 - DNA, 91 bp, Homo sapiens; identical to SEQ ID NO: 341456
  chr12:76878986-76879077
  hypo
  renal vs. ovary,lymphoid_neoplasm,lung, pancreas_gallbladder,liver_bileduct,head_and_neck,colorectal, uterine,upper_gi,prostate,bladder_and_urothelial, multiple_myeloma,breast,sarcoma,melanoma,non_cancer,cervical,
  CONT. FROM ABOVE: anorectal

SEQ ID NO: 477292 - DNA, 32 bp, Homo sapiens
  chr12:76879282-76879314
  hypo
  renal vs. ovary,lung,upper_gi,liver_bileduct, head_and_neck,lymphoid_neoplasm,pancreas_gallbladder,uterine, colorectal,bladder_and_urothelial,breast,melanoma,cervical, prostate
cggaggttgcggtgagcagagatcacgccacc

SEQ ID NO: 477293 - DNA, 105 bp, Homo sapiens; identical to SEQ ID NO: 457456
  chr12:94541793-94541898
  hypo
  renal vs. multiple_myeloma,lymphoid_neoplasm,sarcoma, ovary,anorectal,myeloid_neoplasm

SEQ ID NO: 477294 - DNA, 758 bp, Homo sapiens; identical to SEQ ID NO: 457457
  chr12:94541957-94542715
  hypo
  renal vs. multiple_myeloma,lymphoid_neoplasm,sarcoma, ovary,anorectal,myeloid_neoplasm

SEQ ID NO: 477295 - DNA, 851 bp, Homo sapiens; identical to SEQ ID NO: 457458
  chr12:94542238-94543089
  hypo
  renal vs. ovary,multiple_myeloma,sarcoma,prostate, melanoma,non_cancer,myeloid_neoplasm,thyroid

SEQ ID NO: 477296 - DNA, 373 bp, Homo sapiens; identical to SEQ ID NO: 457459
  chr12:94542716-94543089
  hypo
  renal vs. thyroid,non_cancer

SEQ ID NO: 477297 - DNA, 31 bp, Homo sapiens; identical to SEQ ID NO: 452825
  chr12:94543992-94544023
  hypo
  renal vs. thyroid

SEQ ID NO: 477298 - DNA, 86 bp, Homo sapiens; identical to SEQ ID NO: 345430
  chr12:94544052-94544138
  hypo
  renal vs. thyroid

SEQ ID NO: 477299 - DNA, 349 bp, Homo sapiens; identical to SEQ ID NO: 459395
  chr12:104851545-104851894
  hypo
  renal vs. melanoma,multiple_myeloma

SEQ ID NO: 477300 - DNA, 72 bp, Homo sapiens; identical to SEQ ID NO: 341491
  chr12:110389844-110389916
  hypo
  renal vs. anorectal

SEQ ID NO: 477301 - DNA, 285 bp, Homo sapiens; identical to SEQ ID NO: 461485
  chr12:114337479-114337764
  hypo
  renal vs. myeloid_neoplasm,melanoma,lymphoid_neoplasm

SEQ ID NO: 477302 - DNA, 147 bp, Homo sapiens; identical to SEQ ID NO: 461486
  chr12:114337793-114337940
  hypo
  renal vs. myeloid_neoplasm,melanoma,lymphoid_neoplasm

SEQ ID NO: 477303 - DNA, 238 bp, Homo sapiens
  chr12:117155351-117155589
  hypo
  renal vs. liver_bileduct
cgtgagcccggcctccggtttcatctttcccgaatgggactggctggaggggccaagctgctttacagaagagttccatctggtaagcccgggtggtgagcgaagccaaagatgacaacacgagaaggggtcaaagccaaggtttcctcacgctgcctttgtcttcttcctgcagcctggcccgatggctgaagctgggtcccaggaggcgagttcttcagcggggcctcctcaccca

SEQ ID NO: 477304 - DNA, 187 bp, Homo sapiens; identical to SEQ ID NO: 354948
  chr12:117155627-117155814
  hypo
  renal vs. liver_bileduct

SEQ ID NO: 477305 - DNA, 71 bp, Homo sapiens; identical to SEQ ID NO: 334669
  chr12:117316909-117316980
  hypo
  renal vs. ovary,pancreas_gallbladder,uterine

SEQ ID NO: 477306 - DNA, 32 bp, Homo sapiens; identical to SEQ ID NO: 476759
  chr12:117317225-117317257
  hypo
  renal vs. ovary,cervical,sarcoma

SEQ ID NO: 477307 - DNA, 482 bp, Homo sapiens; identical to SEQ ID NO: 351423
  chr12:117317288-117317770
  hypo
  renal vs. ovary,cervical,sarcoma

SEQ ID NO: 477308 - DNA, 397 bp, Homo sapiens; identical to SEQ ID NO: 453633
  chr12:120147746-120148143
  hypo
  renal vs. non_cancer,melanoma,prostate,sarcoma

SEQ ID NO: 477309 - DNA, 208 bp, Homo sapiens; identical to SEQ ID NO: 348569
  chr12:120148396-120148604
  hypo
  renal vs. non_cancer,melanoma,prostate,sarcoma

SEQ ID NO: 477310 - DNA, 336 bp, Homo sapiens; identical to SEQ ID NO: 465046
  chr12:120148396-120148732
  hypo
  renal vs. lymphoid_neoplasm,melanoma,myeloid_neoplasm, liver_bileduct,non_cancer,sarcoma

SEQ ID NO: 477311 - DNA, 276 bp, Homo sapiens; identical to SEQ ID NO: 341550
  chr12:120186357-120186633
  hypo
  renal vs. colorectal,lymphoid_neoplasm

SEQ ID NO: 477312 - DNA, 65 bp, Homo sapiens; identical to SEQ ID NO: 341551
  chr12:120189911-120189976
  hypo
  renal vs. bladder_and_urothelial,cervical

SEQ ID NO: 477313 - DNA, 304 bp, Homo sapiens; identical to SEQ ID NO: 341568
  chr12:122212948-122213252
  hypo
  renal vs. melanoma

SEQ ID NO: 477314 - DNA, 108 bp, Homo sapiens; identical to SEQ ID NO: 354972
  chr12:122213693-122213801
  hypo
  renal vs. melanoma

SEQ ID NO: 477315 - DNA, 407 bp, Homo sapiens; identical to SEQ ID NO: 341577
  chr12:122480960-122481367
  hypo
  renal vs. sarcoma,anorectal,colorectal,lymphoid_neoplasm, bladder_and_urothelial,pancreas_gallbladder,upper_gi,breast, prostate,cervical,lung,non_cancer,melanoma,uterine, liver_bileduct,myeloid_neoplasm,thyroid,head_and_neck

SEQ ID NO: 477316 - DNA, 376 bp, Homo sapiens
  chr12:122481628-122482004
  hypo
  renal vs. sarcoma,bladder_and_urothelial,cervical, colorectal,head_and_neck,melanoma,breast,lung,anorectal, pancreas_gallbladder,lymphoid_neoplasm,prostate,upper_gi, uterine,non_cancer,liver_bileduct
cgagatccgtctcaaaaaaaaaaaaaacggtaaccagacccctccccgggagagctgccatggggttccgggcattgaggcacagggatgctgagccctctgacctacccgtccttggcagctgtgggatttcatcctgtggttctgttcccaccccctacagacgataacagcaaccagagctccatcgcagatgcctcccccatcaaacaggagaacagcagcaactccagccccgctccagagcccaactcggctgtgcccagcgacggcaccgaggccaaggtggatgaggcccaggctgatgggaaggagcacccaggagctgaaggtatgtggcctctggaggtggggctctgacggcctccctgtaacc

SEQ ID NO: 477317 - DNA, 123 bp, Homo sapiens; identical to SEQ ID NO: 341584
  chr12:122970391-122970514
  hypo
  renal vs. multiple_myeloma,melanoma,prostate, head_and_neck,anorectal,breast,bladder_and_urothelial, colorectal,non_cancer,myeloid_neoplasm,lymphoid_neoplasm,lung, upper_gi,cervical,pancreas_gallbladder,sarcoma,uterine,
  CONT. FROM ABOVE: liver_bileduct,thyroid

SEQ ID NO: 477318 - DNA, 74 bp, Homo sapiens; identical to SEQ ID NO: 471601
  chr12:124893329-124893403
  hypo
  renal vs. head_and_neck,lymphoid_neoplasm, bladder_and_urothelial,lung

SEQ ID NO: 477319 - DNA, 188 bp, Homo sapiens; identical to SEQ ID NO: 366127
  chr12:124893570-124893758
  hypo
  renal vs. head_and_neck,lymphoid_neoplasm, bladder_and_urothelial,lung

SEQ ID NO: 477320 - DNA, 478 bp, Homo sapiens
  chr12:133101020-133101498
  hypo
  renal vs. myeloid_neoplasm,multiple_myeloma
caccctgtcagccacccagggaggcctgttgctgcaggaggtgcacagagcgggcctctggctgagccgaaggtcggcagggagccaggctcatggctgcagcgagccacaccagccagtcctgggacgggtttccccgggctggggcgtgctcctgacttggatgactcaaagtaaagaacctcaccaggggccctggcatgcgaggcctgggggcccagatgtgctggggcgtgtcactacaaggtgcagaattgttccagatccaagttggccagagagggagaccgctgggcttccacgtgagtctgggcgctggctgtgcaggggcgtccctgctgggcgctggccagcaggagctctggcctctcacttccctcagctttgtgcaggtttgaaattatttccaagtaaaaaaagtaaatacatgcagggctcggggtctggtccctgcatggtcacttaacctgtctgcgcc

SEQ ID NO: 477321 - DNA, 428 bp, Homo sapiens
  chr12:133101070-133101498
  hypo
  renal vs. myeloid_neoplasm
cgggcctctggctgagccgaaggtcggcagggagccaggctcatggctgcagcgagccacaccagccagtcctgggacgggtttccccgggctggggcgtgctcctgacttggatgactcaaagtaaagaacctcaccaggggccctggcatgcgaggcctgggggcccagatgtgctggggcgtgtcactacaaggtgcagaattgttccagatccaagttggccagagagggagaccgctgggcttccacgtgagtctgggcgctggctgtgcaggggcgtccctgctgggcgctggccagcaggagctctggcctctcacttccctcagctttgtgcaggtttgaaattatttccaagtaaaaaaagtaaatacatgcagggctcggggtctggtccctgcatggtcacttaacctgtctgcgcc

SEQ ID NO: 477322 - DNA, 497 bp, Homo sapiens; identical to SEQ ID NO: 366193
  chr12:133101527-133102024
  hypo
  renal vs. myeloid_neoplasm

SEQ ID NO: 477323 - DNA, 413 bp, Homo sapiens; identical to SEQ ID NO: 341671
  chr12:133111693-133112106
  hypo
  renal vs. liver_bileduct,uterine,bladder_and_urothelial, pancreas_gallbladder,breast,colorectal,head_and_neck,thyroid, upper_gi,cervical,prostate,lung,anorectal,non_cancer

SEQ ID NO: 477324 - DNA, 500 bp, Homo sapiens; identical to SEQ ID NO: 366195
  chr12:133121644-133122144
  hypo
  renal vs. melanoma,prostate,lymphoid_neoplasm

SEQ ID NO: 477325 - DNA, 168 bp, Homo sapiens; identical to SEQ ID NO: 462415
  chr13:20735265-20735433
  hypo
  renal vs. uterine

SEQ ID NO: 477326 - DNA, 190 bp, Homo sapiens; identical to SEQ ID NO: 341693
  chr13:25026495-25026685
  hypo
  renal vs. liver_bileduct,lung,bladder_and_urothelial, upper_gi,sarcoma,head_and_neck,ovary,lymphoid_neoplasm, pancreas_gallbladder,uterine,colorectal,breast,melanoma, prostate,myeloid_neoplasm,thyroid,cervical,non_cancer

SEQ ID NO: 477327 - DNA, 126 bp, Homo sapiens; identical to SEQ ID NO: 472834
  chr13:28745545-28745671
  hypo
  renal vs. lymphoid_neoplasm,liver_bileduct,sarcoma, pancreas_gallbladder,melanoma,head_and_neck,multiple_myeloma, bladder_and_urothelial,prostate,cervical,non_cancer,anorectal, breast,upper_gi,myeloid_neoplasm,lung

SEQ ID NO: 477328 - DNA, 243 bp, Homo sapiens; identical to SEQ ID NO: 341703
  chr13:28745848-28746091
  hypo
  renal vs. liver_bileduct

SEQ ID NO: 477329 - DNA, 178 bp, Homo sapiens; identical to SEQ ID NO: 468743
  chr13:33000891-33001069
  hypo
  renal vs. multiple_myeloma,anorectal,lymphoid_neoplasm

SEQ ID NO: 477330 - DNA, 204 bp, Homo sapiens; identical to SEQ ID NO: 351462
  chr13:33001228-33001432
  hypo
  renal vs. multiple_myeloma,anorectal,lymphoid_neoplasm

SEQ ID NO: 477331 - DNA, 480 bp, Homo sapiens; identical to SEQ ID NO: 468747
  chr13:42032017-42032497
  hypo
  renal vs. cervical,bladder_and_urothelial,lung

SEQ ID NO: 477332 - DNA, 109 bp, Homo sapiens; identical to SEQ ID NO: 347265
  chr13:42032649-42032758
  hypo
  renal vs. cervical,bladder_and_urothelial,lung

SEQ ID NO: 477333 - DNA, 141 bp, Homo sapiens; identical to SEQ ID NO: 341739
  chr13:52335934-52336075
  hypo
  renal vs. liver_bileduct,cervical,head_and_neck, pancreas_gallbladder,sarcoma,colorectal,breast,prostate

SEQ ID NO: 477334 - DNA, 438 bp, Homo sapiens; identical to SEQ ID NO: 341762
  chr13:96085837-96086275
  hypo
  renal vs. sarcoma,lymphoid_neoplasm, bladder_and_urothelial,lung,head_and_neck,cervical,breast, colorectal,pancreas_gallbladder,prostate,upper_gi,thyroid, non_cancer,melanoma,anorectal,myeloid_neoplasm,uterine,
  CONT. FROM ABOVE: liver_bileduct,ovary

SEQ ID NO: 477335 - DNA, 234 bp, Homo sapiens; identical to SEQ ID NO: 355064
  chr13:99034903-99035137
  hypo
  renal vs. ovary,liver_bileduct,lung,anorectal,upper_gi, bladder_and_urothelial

SEQ ID NO: 477336 - DNA, 270 bp, Homo sapiens; identical to SEQ ID NO: 474614
  chr13:111330283-111330553
  hypo
  renal vs. bladder_and_urothelial,uterine,upper_gi, liver_bileduct,breast,melanoma,prostate,colorectal,lung, lymphoid_neoplasm,thyroid,head_and_neck,non_cancer

SEQ ID NO: 477337 - DNA, 687 bp, Homo sapiens; identical to SEQ ID NO: 341795
  chr13:111880810-111881497
  hypo
  renal vs. myeloid_neoplasm

SEQ ID NO: 477338 - DNA, 91 bp, Homo sapiens; identical to SEQ ID NO: 341815
  chr13:113413685-113413776
  hypo
  renal vs. pancreas_gallbladder,bladder_and_urothelial, head_and_neck

SEQ ID NO: 477339 - DNA, 306 bp, Homo sapiens; identical to SEQ ID NO: 341818
  chr13:113477621-113477927
  hypo
  renal vs. liver_bileduct,lymphoid_neoplasm,head_and_neck, pancreas_gallbladder,lung,colorectal,melanoma,sarcoma,breast

SEQ ID NO: 477340 - DNA, 535 bp, Homo sapiens; identical to SEQ ID NO: 341819
  chr13:113497181-113497716
  hypo
  renal vs. lymphoid_neoplasm,cervical,colorectal,melanoma, liver_bileduct,upper_gi,breast,pancreas_gallbladder,lung, prostate,myeloid_neoplasm,bladder_and_urothelial,non_cancer, head_and_neck,thyroid

SEQ ID NO: 477341 - DNA, 121 bp, Homo sapiens; identical to SEQ ID NO: 471632
  chr13:113825842-113825963
  hypo
  renal vs. liver_bileduct

SEQ ID NO: 477342 - DNA, 173 bp, Homo sapiens; identical to SEQ ID NO: 366307
  chr13:113825992-113826165
  hypo
  renal vs. liver_bileduct

SEQ ID NO: 477343 - DNA, 62 bp, Homo sapiens; identical to SEQ ID NO: 472856
  chr13:114502726-114502788
  hypo
  renal vs. lymphoid_neoplasm,sarcoma

SEQ ID NO: 477344 - DNA, 270 bp, Homo sapiens; identical to SEQ ID NO: 347285
  chr14:36003004-36003274
  hypo
  renal vs. ovary,prostate,uterine,sarcoma,head_and_neck

SEQ ID NO: 477345 - DNA, 439 bp, Homo sapiens; identical to SEQ ID NO: 462437
  chr14:36003004-36003443
  hypo
  renal vs. sarcoma,ovary,prostate,anorectal

SEQ ID NO: 477346 - DNA, 15 bp, Homo sapiens
  chr14:50287112-50287127
  hypo
  renal vs. lymphoid_neoplasm,bladder_and_urothelial, head_and_neck,cervical,breast,lung,uterine,ovary, multiple_myeloma,anorectal,prostate,sarcoma,melanoma,thyroid, non_cancer,myeloid_neoplasm,pancreas_gallbladder
cgcgttgtcctctgg

SEQ ID NO: 477347 - DNA, 36 bp, Homo sapiens; identical to SEQ ID NO: 348627
  chr14:50287178-50287214
  hypo
  renal vs. lymphoid_neoplasm,bladder_and_urothelial, head_and_neck,cervical,breast,lung,uterine,ovary, multiple_myeloma,anorectal,prostate,sarcoma,melanoma,thyroid, non_cancer,myeloid_neoplasm,pancreas_gallbladder

SEQ ID NO: 477348 - DNA, 50 bp, Homo sapiens; identical to SEQ ID NO: 341904
  chr14:50574258-50574308
  hypo
  renal vs. liver_bileduct,colorectal,myeloid_neoplasm, upper_gi

SEQ ID NO: 477349 - DNA, 126 bp, Homo sapiens; identical to SEQ ID NO: 341912
  chr14:55522633-55522759
  hypo
  renal vs. liver_bileduct,pancreas_gallbladder,upper_gi

SEQ ID NO: 477350 - DNA, 72 bp, Homo sapiens; identical to SEQ ID NO: 465108
  chr14:69245863-69245935
  hypo

SEQ ID NO: 477351 - DNA, 15 bp, Homo sapiens
  chr14:69245974-69245989
  hypo
caggaggctgggcgc

SEQ ID NO: 477352 - DNA, 274 bp, Homo sapiens; identical to SEQ ID NO: 341975
  chr14:81879122-81879396
  hypo
  renal vs. lung,lymphoid_neoplasm,sarcoma,upper_gi, head_and_neck,pancreas_gallbladder,anorectal,colorectal, cervical,breast

SEQ ID NO: 477353 - DNA, 438 bp, Homo sapiens
  chr14:89627945-89628383
  hypo
  renal vs. lymphoid_neoplasm,myeloid_neoplasm,upper_gi, breast,ovary,head_and_neck
cgtgcacagggccaatcttcaggcttatggcttttggaacattttcttaatttaatagagaacagaattcaatgattagcaacatcactaaaaatttaccccatttcttctccatgagtcactgacacccgatgcgcatgaacagtccaacgtccacctcgtaagatgtcatcgggcttcagggttcagaagcatcgaggactggtggccggccctctgtgctcgccgtgtgacaattccagtggctttcctggcaccatcagatgcctggtgccacaagcttgggtctgctcctagggggacgaggggttcctcctcctcctcaattgctttatgtgccttcactcagtgaacccaatgggatggacaacctgactttttaaacctaagggttgggcctgaacgatgattactttgcccacgtgccttctaggtgcc

SEQ ID NO: 477354 - DNA, 136 bp, Homo sapiens; identical to SEQ ID NO: 341990
  chr14:90871545-90871681
  hypo
  renal vs. breast,melanoma,prostate, bladder_and_urothelial,thyroid,lymphoid_neoplasm,non_cancer, sarcoma,cervical,uterine

SEQ ID NO: 477355 - DNA, 267 bp, Homo sapiens; identical to SEQ ID NO: 334997
  chr14:91755357-91755624
  hypo
  renal vs. pancreas_gallbladder

SEQ ID NO: 477356 - DNA, 119 bp, Homo sapiens; identical to SEQ ID NO: 355186
  chr14:102691860-102691979
  hypo
  renal vs. melanoma,colorectal,liver_bileduct,cervical, head_and_neck,breast,pancreas_gallbladder,upper_gi,lung, prostate,bladder_and_urothelial

SEQ ID NO: 477357 - DNA, 257 bp, Homo sapiens; identical to SEQ ID NO: 380686
  chr14:102968257-102968514
  hypo
  renal vs. liver_bileduct

SEQ ID NO: 477358 - DNA, 423 bp, Homo sapiens; identical to SEQ ID NO: 465137
  chr14:105689521-105689944
  hypo
  renal vs. lymphoid_neoplasm,breast

SEQ ID NO: 477359 - DNA, 116 bp, Homo sapiens; identical to SEQ ID NO: 472885
  chr15:28516961-28517077
  hypo
  renal vs. melanoma,breast,anorectal

SEQ ID NO: 477360 - DNA, 177 bp, Homo sapiens; identical to SEQ ID NO: 346096
  chr15:28517198-28517375
  hypo
  renal vs. melanoma,breast,anorectal

SEQ ID NO: 477361 - DNA, 103 bp, Homo sapiens; identical to SEQ ID NO: 463364
  chr15:31188921-31189024
  hypo
  renal vs. sarcoma,anorectal,breast,uterine,lung,thyroid, head_and_neck,non_cancer,prostate,lymphoid_neoplasm,cervical, bladder_and_urothelial,multiple_myeloma

SEQ ID NO: 477362 - DNA, 218 bp, Homo sapiens; identical to SEQ ID NO: 342138
  chr15:31668823-31669041
  hypo
  renal vs. melanoma,liver_bileduct

SEQ ID NO: 477363 - DNA, 77 bp, Homo sapiens; identical to SEQ ID NO: 342161
  chr15:41769434-41769511
  hypo
  renal vs. head_and_neck,cervical

SEQ ID NO: 477364 - DNA, 113 bp, Homo sapiens; identical to SEQ ID NO: 342188
  chr15:58839542-58839655
  hypo
  renal vs. lymphoid_neoplasm,melanoma

SEQ ID NO: 477365 - DNA, 153 bp, Homo sapiens; identical to SEQ ID NO: 342203
  chr15:63066085-63066238
  hypo
  renal vs. melanoma,prostate,breast, bladder_and_urothelial,anorectal,colorectal,non_cancer, pancreas_gallbladder,cervical,sarcoma,head_and_neck,lung, upper_gi

SEQ ID NO: 477366 - DNA, 760 bp, Homo sapiens; identical to SEQ ID NO: 470215
  chr15:63132478-63133238
  hypo
  renal vs. ovary,bladder_and_urothelial,upper_gi,uterine, prostate,colorectal,breast

SEQ ID NO: 477367 - DNA, 747 bp, Homo sapiens; identical to SEQ ID NO: 355264
  chr15:63132755-63133502
  hypo
  renal vs. ovary,upper_gi,prostate,uterine, pancreas_gallbladder,breast,sarcoma,colorectal, bladder_and_urothelial,lung,non_cancer,cervical

SEQ ID NO: 477368 - DNA, 206 bp, Homo sapiens; identical to SEQ ID NO: 342211
  chr15:63597968-63598174
  hypo
  renal vs. liver_bileduct,upper_gi,pancreas_gallbladder, bladder_and_urothelial,colorectal,head_and_neck

SEQ ID NO: 477369 - DNA, 68 bp, Homo sapiens
  chr15:64683087-64683155
  hypo
  renal vs. lung,liver_bileduct,pancreas_gallbladder, head_and_neck,bladder_and_urothelial,colorectal, multiple_myeloma,lymphoid_neoplasm,cervical,upper_gi,sarcoma, melanoma,uterine,prostate,anorectal,breast
cgtctcaaaaaaaaaaaaaaattatattccgcctgggaaggaggtcagtgcccgtcggcatgtattac

SEQ ID NO: 477370 - DNA, 410 bp, Homo sapiens; identical to SEQ ID NO: 342228
  chr15:70352928-70353338
  hypo
  renal vs. lung,upper_gi,head_and_neck,breast,uterine, melanoma,cervical,liver_bileduct

SEQ ID NO: 477371 - DNA, 242 bp, Homo sapiens; identical to SEQ ID NO: 380861
  chr15:70354323-70354565
  hypo
  renal vs. lymphoid_neoplasm

SEQ ID NO: 477372 - DNA, 57 bp, Homo sapiens; identical to SEQ ID NO: 342230
  chr15:70355607-70355664
  hypo
  renal vs. head_and_neck

SEQ ID NO: 477373 - DNA, 247 bp, Homo sapiens; identical to SEQ ID NO: 291013
  chr15:75248843-75249090
  hypo
  renal vs. anorectal

SEQ ID NO: 477374 - DNA, 188 bp, Homo sapiens; identical to SEQ ID NO: 355284
  chr15:80471858-80472046
  hypo
  renal vs. cervical,breast,pancreas_gallbladder, colorectal,liver_bileduct,melanoma,prostate

SEQ ID NO: 477375 - DNA, 305 bp, Homo sapiens; identical to SEQ ID NO: 342268
  chr15:86306299-86306604
  hypo
  renal vs. liver_bileduct,upper_gi,lung,head_and_neck

SEQ ID NO: 477376 - DNA, 48 bp, Homo sapiens
  chr15:89876331-89876379
  hypo
  renal vs. multiple_myeloma,prostate
cgagggggatatggccaccgccaatgtggggcaagttccctctgccaa

SEQ ID NO: 477377 - DNA, 110 bp, Homo sapiens; identical to SEQ ID NO: 462489
  chr15:91427360-91427470
  hypo
  renal vs. multiple_myeloma,uterine,pancreas_gallbladder, cervical,anorectal,bladder_and_urothelial,myeloid_neoplasm, thyroid

SEQ ID NO: 477378 - DNA, 77 bp, Homo sapiens; identical to SEQ ID NO: 351744
  chr15:91427979-91428056
  hypo
  renal vs. multiple_myeloma,uterine,pancreas_gallbladder, cervical,anorectal,bladder_and_urothelial,myeloid_neoplasm, thyroid

SEQ ID NO: 477379 - DNA, 67 bp, Homo sapiens; identical to SEQ ID NO: 342289
  chr15:93504252-93504319
  hypo
  renal vs. upper_gi,ovary,lymphoid_neoplasm,lung, bladder_and_urothelial,breast,sarcoma,uterine,cervical,melanoma, pancreas_gallbladder,liver_bileduct,anorectal,myeloid_neoplasm

SEQ ID NO: 477380 - DNA, 358 bp, Homo sapiens; identical to SEQ ID NO: 355318
  chr16:311205-311563
  hypo
  renal vs. bladder_and_urothelial

SEQ ID NO: 477381 - DNA, 367 bp, Homo sapiens; identical to SEQ ID NO: 342333
  chr16:350669-351036
  hypo
  renal vs. head_and_neck,breast,upper_gi,liver_bileduct, melanoma,sarcoma,colorectal,lung,pancreas_gallbladder, lymphoid_neoplasm,prostate,myeloid_neoplasm,uterine, bladder_and_urothelial,cervical,thyroid,anorectal

SEQ ID NO: 477382 - DNA, 6 bp, Homo sapiens
  chr16:521899-521905
  hypo
  renal vs. upper_gi,colorectal,uterine, pancreas_gallbladder,prostate,lymphoid_neoplasm,breast, non_cancer,liver_bileduct
tggtcg

SEQ ID NO: 477383 - DNA, 214 bp, Homo sapiens; identical to SEQ ID NO: 355325
  chr16:521925-522139
  hypo
  renal vs. upper_gi,colorectal,uterine, pancreas_gallbladder,prostate,lymphoid_neoplasm,breast, non_cancer,liver_bileduct

SEQ ID NO: 477384 - DNA, 309 bp, Homo sapiens; identical to SEQ ID NO: 366704
  chr16:524299-524608
  hypo
  renal vs. sarcoma,lymphoid_neoplasm,head_and_neck,breast, anorectal

SEQ ID NO: 477385 - DNA, 128 bp, Homo sapiens; identical to SEQ ID NO: 355326
  chr16:533135-533263
  hypo
  renal vs. liver_bileduct,pancreas_gallbladder,upper_gi, head_and_neck,colorectal,breast,lung

SEQ ID NO: 477386 - DNA, 71 bp, Homo sapiens; identical to SEQ ID NO: 465163
  chr16:677367-677438
  hypo
  renal vs. lymphoid_neoplasm,uterine,anorectal,colorectal, head_and_neck,prostate,breast,bladder_and_urothelial,upper_gi, non_cancer,multiple_myeloma

SEQ ID NO: 477387 - DNA, 20 bp, Homo sapiens
  chr16:677467-677487
  hypo
  renal vs. lymphoid_neoplasm,uterine,anorectal,colorectal, head_and_neck,prostate,breast,bladder_and_urothelial,upper_gi, non_cancer,multiple_myeloma
tgaacgcggtcatgatgcac

SEQ ID NO: 477388 - DNA, 35 bp, Homo sapiens; identical to SEQ ID NO: 465165
  chr16:677803-677838
  hypo
  renal vs. multiple_myeloma,lymphoid_neoplasm,uterine, bladder_and_urothelial,prostate,sarcoma,breast,colorectal, non_cancer,myeloid_neoplasm,upper_gi,pancreas_gallbladder, liver_bileduct

SEQ ID NO: 477389 - DNA, 64 bp, Homo sapiens; identical to SEQ ID NO: 465166
  chr16:677909-677973
  hypo
  renal vs. multiple_myeloma,lymphoid_neoplasm,uterine, bladder_and_urothelial,prostate,sarcoma,breast,colorectal, non_cancer,myeloid_neoplasm,upper_gi,pancreas_gallbladder, liver_bileduct

SEQ ID NO: 477390 - DNA, 106 bp, Homo sapiens; identical to SEQ ID NO: 348690
  chr16:678084-678190
  hypo
  renal vs. multiple_myeloma,lymphoid_neoplasm,uterine, bladder_and_urothelial,prostate,sarcoma,breast,colorectal, non_cancer,myeloid_neoplasm,upper_gi,pancreas_gallbladder, liver_bileduct

SEQ ID NO: 477391 - DNA, 259 bp, Homo sapiens; identical to SEQ ID NO: 465170
  chr16:981471-981730
  hypo
  renal vs. anorectal,head_and_neck,breast, lymphoid_neoplasm,thyroid

SEQ ID NO: 477392 - DNA, 227 bp, Homo sapiens; identical to SEQ ID NO: 465171
  chr16:981843-982070
  hypo
  renal vs. anorectal,head_and_neck,breast, lymphoid_neoplasm,thyroid

SEQ ID NO: 477393 - DNA, 278 bp, Homo sapiens; identical to SEQ ID NO: 355343
  chr16:982099-982377
  hypo
  renal vs. anorectal,head_and_neck,breast, lymphoid_neoplasm,thyroid

SEQ ID NO: 477394 - DNA, 195 bp, Homo sapiens; identical to SEQ ID NO: 456532
  chr16:1730112-1730307
  hypo
  renal vs. multiple_myeloma

SEQ ID NO: 477395 - DNA, 105 bp, Homo sapiens; identical to SEQ ID NO: 346116
  chr16:1730761-1730866
  hypo
  renal vs. multiple_myeloma

SEQ ID NO: 477396 - DNA, 728 bp, Homo sapiens; identical to SEQ ID NO: 456534
  chr16:1737575-1738303
  hypo
  renal vs. melanoma

SEQ ID NO: 477397 - DNA, 2 bp, Homo sapiens
  chr16:1738332-1738334
  hypo
  renal vs. melanoma
tc

SEQ ID NO: 477398 - DNA, 346 bp, Homo sapiens; identical to SEQ ID NO: 355362
  chr16:1812272-1812618
  hypo
  renal vs. liver_bileduct,upper_gi

SEQ ID NO: 477399 - DNA, 53 bp, Homo sapiens; identical to SEQ ID NO: 366764
  chr16:1812929-1812982
  hypo
  renal vs. liver_bileduct

SEQ ID NO: 477400 - DNA, 48 bp, Homo sapiens; identical to SEQ ID NO: 345484
  chr16:2042503-2042551
  hypo
  renal vs. anorectal,myeloid_neoplasm,thyroid,non_cancer

SEQ ID NO: 477401 - DNA, 41 bp, Homo sapiens; identical to SEQ ID NO: 465188
  chr16:2497839-2497880
  hypo
  renal vs. lymphoid_neoplasm

SEQ ID NO: 477402 - DNA, 76 bp, Homo sapiens; identical to SEQ ID NO: 366800
  chr16:2498053-2498129
  hypo
  renal vs. lymphoid_neoplasm

SEQ ID NO: 477403 - DNA, 362 bp, Homo sapiens; identical to SEQ ID NO: 342448
  chr16:3741902-3742264
  hypo
  renal vs. liver_bileduct,cervical,ovary,lung

SEQ ID NO: 477404 - DNA, 69 bp, Homo sapiens; identical to SEQ ID NO: 472938
  chr16:4430998-4431067
  hypo
  renal vs. melanoma,bladder_and_urothelial

SEQ ID NO: 477405 - DNA, 8 bp, Homo sapiens
  chr16:4431119-4431127
  hypo
  renal vs. melanoma,bladder_and_urothelial
tggacctg

SEQ ID NO: 477406 - DNA, 299 bp, Homo sapiens; identical to SEQ ID NO: 472940
  chr16:4431189-4431488
  hypo
  renal vs. melanoma,bladder_and_urothelial

SEQ ID NO: 477407 - DNA, 313 bp, Homo sapiens; identical to SEQ ID NO: 355412
  chr16:4431516-4431829
  hypo
  renal vs. melanoma,bladder_and_urothelial

SEQ ID NO: 477408 - DNA, 11 bp, Homo sapiens
  chr16:4644993-4645004
  hypo
  renal vs. anorectal
cgcgggagcga

SEQ ID NO: 477409 - DNA, 103 bp, Homo sapiens; identical to SEQ ID NO: 366836
  chr16:4645033-4645136
  hypo
  renal vs. anorectal

SEQ ID NO: 477410 - DNA, 308 bp, Homo sapiens; identical to SEQ ID NO: 342469
  chr16:4779967-4780275
  hypo
  renal vs. lung,pancreas_gallbladder,colorectal,anorectal, cervical

SEQ ID NO: 477411 - DNA, 310 bp, Homo sapiens; identical to SEQ ID NO: 342487
  chr16:11192863-11193173
  hypo
  renal vs. liver_bileduct,pancreas_gallbladder,upper_gi

SEQ ID NO: 477412 - DNA, 199 bp, Homo sapiens; identical to SEQ ID NO: 342491
  chr16:12084484-12084683
  hypo
  renal vs. liver_bileduct,upper_gi

SEQ ID NO: 477413 - DNA, 243 bp, Homo sapiens; identical to SEQ ID NO: 342497
  chr16:12609457-12609700
  hypo
  renal vs. liver_bileduct,pancreas_gallbladder

SEQ ID NO: 477414 - DNA, 160 bp, Homo sapiens; identical to SEQ ID NO: 342508
  chr16:16103307-16103467
  hypo
  renal vs. head_and_neck,bladder_and_urothelial,anorectal, breast,multiple_myeloma,colorectal,upper_gi, pancreas_gallbladder

SEQ ID NO: 477415 - DNA, 183 bp, Homo sapiens; identical to SEQ ID NO: 342510
  chr16:16227979-16228162
  hypo

SEQ ID NO: 477416 - DNA, 41 bp, Homo sapiens; identical to SEQ ID NO: 342516
  chr16:21515452-21515493
  hypo
  renal vs. anorectal,bladder_and_urothelial,melanoma, cervical,lung,breast,prostate,head_and_neck,sarcoma

SEQ ID NO: 477417 - DNA, 184 bp, Homo sapiens; identical to SEQ ID NO: 360800
  chr16:23193716-23193900
  hypo
  renal vs. head_and_neck

SEQ ID NO: 477418 - DNA, 239 bp, Homo sapiens; identical to SEQ ID NO: 342526
  chr16:23539152-23539391
  hypo
  renal vs. ovary,sarcoma

SEQ ID NO: 477419 - DNA, 10 bp, Homo sapiens
  chr16:23846783-23846793
  hypo
  renal vs. non_cancer,myeloid_neoplasm,thyroid, multiple_myeloma,melanoma
cgctcctccc

SEQ ID NO: 477420 - DNA, 345 bp, Homo sapiens; identical to SEQ ID NO: 342588
  chr16:56398009-56398354
  hypo
  renal vs. melanoma,bladder_and_urothelial,anorectal, upper_gi

SEQ ID NO: 477421 - DNA, 246 bp, Homo sapiens; identical to SEQ ID NO: 342593
  chr16:57559728-57559974
  hypo
  renal vs. liver_bileduct

SEQ ID NO: 477422 - DNA, 109 bp, Homo sapiens; identical to SEQ ID NO: 342605
  chr16:67175573-67175682
  hypo
  renal vs. lung,head_and_neck,upper_gi

SEQ ID NO: 477423 - DNA, 144 bp, Homo sapiens; identical to SEQ ID NO: 342625
  chr16:69383506-69383650
  hypo
  renal vs. bladder_and_urothelial,ovary,upper_gi

SEQ ID NO: 477424 - DNA, 166 bp, Homo sapiens; identical to SEQ ID NO: 342628
  chr16:69921972-69922138
  hypo
  renal vs. anorectal,liver_bileduct,colorectal, myeloid_neoplasm,head_and_neck,lung,thyroid, bladder_and_urothelial,pancreas_gallbladder,cervical, multiple_myeloma,non_cancer,prostate,sarcoma,upper_gi

SEQ ID NO: 477425 - DNA, 111 bp, Homo sapiens; identical to SEQ ID NO: 342629
  chr16:69922460-69922571
  hypo
  renal vs. head_and_neck,cervical,colorectal, pancreas_gallbladder,lung,thyroid,bladder_and_urothelial, liver_bileduct,prostate,upper_gi,non_cancer

SEQ ID NO: 477426 - DNA, 352 bp, Homo sapiens; identical to SEQ ID NO: 342633
  chr16:70808012-70808364
  hypo
  renal vs. lung,ovary,pancreas_gallbladder,upper_gi, uterine,bladder_and_urothelial,head_and_neck,sarcoma,colorectal, lymphoid_neoplasm,breast,anorectal,liver_bileduct,prostate, cervical,melanoma,thyroid,non_cancer

SEQ ID NO: 477427 - DNA, 1 bp, Homo sapiens
  chr16:72038773-72038774
  hypo
  renal vs. colorectal,prostate,breast
c

SEQ ID NO: 477428 - DNA, 174 bp, Homo sapiens; identical to SEQ ID NO: 335377
  chr16:74659437-74659611
  hypo
  renal vs. lung,lymphoid_neoplasm,liver_bileduct, bladder_and_urothelial,pancreas_gallbladder,breast,uterine, prostate,head_and_neck,colorectal,ovary,cervical,sarcoma, melanoma,upper_gi,anorectal,non_cancer,thyroid

SEQ ID NO: 477429 - DNA, 86 bp, Homo sapiens; identical to SEQ ID NO: 342644
  chr16:74984568-74984654
  hypo
  renal vs. lymphoid_neoplasm,colorectal,multiple_myeloma, sarcoma,liver_bileduct,pancreas_gallbladder,prostate,upper_gi, non_cancer,lung,bladder_and_urothelial,melanoma,cervical, myeloid_neoplasm,breast

SEQ ID NO: 477430 - DNA, 205 bp, Homo sapiens; identical to SEQ ID NO: 457590
  chr16:77247511-77247716
  hypo
  renal vs. multiple_myeloma,lymphoid_neoplasm,uterine, prostate

SEQ ID NO: 477431 - DNA, 315 bp, Homo sapiens; identical to SEQ ID NO: 335387
  chr16:78322882-78323197
  hypo
  renal vs. anorectal

SEQ ID NO: 477432 - DNA, 606 bp, Homo sapiens; identical to SEQ ID NO: 342667
  chr16:81565589-81566195
  hypo
  renal vs. sarcoma,liver_bileduct,uterine,ovary,melanoma, upper_gi,thyroid,breast,prostate,lung,colorectal,head_and_neck, pancreas_gallbladder,lymphoid_neoplasm,cervical,non_cancer, bladder_and_urothelial

SEQ ID NO: 477433 - DNA, 140 bp, Homo sapiens; identical to SEQ ID NO: 342668
  chr16:81580491-81580631
  hypo
  renal vs. liver_bileduct,bladder_and_urothelial, head_and_neck,sarcoma,melanoma,breast,upper_gi

SEQ ID NO: 477434 - DNA, 189 bp, Homo sapiens; identical to SEQ ID NO: 342677
  chr16:83934496-83934685
  hypo
  renal vs. bladder_and_urothelial,lung,liver_bileduct, breast

SEQ ID NO: 477435 - DNA, 133 bp, Homo sapiens; identical to SEQ ID NO: 381326
  chr16:85007919-85008052
  hypo
  renal vs. head_and_neck

SEQ ID NO: 477436 - DNA, 87 bp, Homo sapiens; identical to SEQ ID NO: 342695
  chr16:85453282-85453369
  hypo
  renal vs. anorectal,liver_bileduct

SEQ ID NO: 477437 - DNA, 45 bp, Homo sapiens
  chr16:85683926-85683971
  hypo
  renal vs. cervical
cgactcaaacagctgaggctccttgcgccccactggtggggcctg

SEQ ID NO: 477438 - DNA, 105 bp, Homo sapiens; identical to SEQ ID NO: 342722
  chr16:87471750-87471855
  hypo
  renal vs. liver_bileduct

SEQ ID NO: 477439 - DNA, 400 bp, Homo sapiens; identical to SEQ ID NO: 462524
  chr16:89006909-89007309
  hypo
  renal vs. uterine

SEQ ID NO: 477440 - DNA, 84 bp, Homo sapiens; identical to SEQ ID NO: 462525
  chr16:89007225-89007309
  hypo
  renal vs. melanoma,thyroid,breast

SEQ ID NO: 477441 - DNA, 92 bp, Homo sapiens; identical to SEQ ID NO: 462526
  chr16:89007789-89007881
  hypo
  renal vs. melanoma,thyroid,breast

SEQ ID NO: 477442 - DNA, 211 bp, Homo sapiens; identical to SEQ ID NO: 347401
  chr16:89007995-89008206
  hypo
  renal vs. melanoma,thyroid,breast

SEQ ID NO: 477443 - DNA, 92 bp, Homo sapiens; identical to SEQ ID NO: 462526
  chr16:89007789-89007881
  hypo
  renal vs. multiple_myeloma,melanoma,breast,sarcoma

SEQ ID NO: 477444 - DNA, 374 bp, Homo sapiens; identical to SEQ ID NO: 462529
  chr16:89007995-89008369
  hypo
  renal vs. multiple_myeloma,melanoma,breast,sarcoma

SEQ ID NO: 477445 - DNA, 7 bp, Homo sapiens
  chr16:89008592-89008599
  hypo
  renal vs. multiple_myeloma,melanoma,breast,sarcoma
cccgccc

SEQ ID NO: 477446 - DNA, 542 bp, Homo sapiens; identical to SEQ ID NO: 342780
  chr16:89169538-89170080
  hypo
  renal vs. head_and_neck

SEQ ID NO: 477447 - DNA, 58 bp, Homo sapiens; identical to SEQ ID NO: 342795
  chr16:89446081-89446139
  hypo
  renal vs. myeloid_neoplasm

SEQ ID NO: 477448 - DNA, 98 bp, Homo sapiens; identical to SEQ ID NO: 355555
  chr16:89647563-89647661
  hypo
  renal vs. anorectal,head_and_neck

SEQ ID NO: 477449 - DNA, 110 bp, Homo sapiens; identical to SEQ ID NO: 381482
  chr17:2289839-2289949
  hypo
  renal vs. melanoma

SEQ ID NO: 477450 - DNA, 122 bp, Homo sapiens; identical to SEQ ID NO: 457600
  chr17:3599052-3599174
  hypo
  renal vs. ovary,bladder_and_urothelial

SEQ ID NO: 477451 - DNA, 392 bp, Homo sapiens; identical to SEQ ID NO: 457601
  chr17:3599244-3599636
  hypo
  renal vs. ovary,bladder_and_urothelial

SEQ ID NO: 477452 - DNA, 459 bp, Homo sapiens; identical to SEQ ID NO: 351870
  chr17:3867210-3867669
  hypo
  renal vs. multiple_myeloma,myeloid_neoplasm,non_cancer

SEQ ID NO: 477453 - DNA, 201 bp, Homo sapiens; identical to SEQ ID NO: 335438
  chr17:3867893-3868094
  hypo
  renal vs. ovary

SEQ ID NO: 477454 - DNA, 336 bp, Homo sapiens; identical to SEQ ID NO: 342850
  chr17:4392128-4392464
  hypo
  renal vs. bladder_and_urothelial,upper_gi,liver_bileduct

SEQ ID NO: 477455 - DNA, 507 bp, Homo sapiens; identical to SEQ ID NO: 342855
  chr17:4795549-4796056
  hypo
  renal vs. upper_gi,lung,bladder_and_urothelial, pancreas_gallbladder

SEQ ID NO: 477456 - DNA, 569 bp, Homo sapiens; identical to SEQ ID NO: 355585
  chr17:7224752-7225321
  hypo
  renal vs. uterine,lung,pancreas_gallbladder,upper_gi, bladder_and_urothelial,head_and_neck,colorectal,sarcoma,breast, liver_bileduct,lymphoid_neoplasm,anorectal

SEQ ID NO: 477457 - DNA, 27 bp, Homo sapiens
  chr17:16256915-16256942
  hypo
  renal vs. uterine,colorectal
cggcccgcccggccgctgggacgcacc

SEQ ID NO: 477458 - DNA, 109 bp, Homo sapiens; identical to SEQ ID NO: 360970
  chr17:16257038-16257147
  hypo
  renal vs. uterine,colorectal

SEQ ID NO: 477459 - DNA, 602 bp, Homo sapiens; identical to SEQ ID NO: 355611
  chr17:18854647-18855249
  hypo
  renal vs. lymphoid_neoplasm,head_and_neck, bladder_and_urothelial,ovary,prostate,colorectal,breast,lung, anorectal,melanoma,cervical,myeloid_neoplasm

SEQ ID NO: 477460 - DNA, 64 bp, Homo sapiens; identical to SEQ ID NO: 367191
  chr17:18855505-18855569
  hypo
  renal vs. anorectal

SEQ ID NO: 477461 - DNA, 200 bp, Homo sapiens; identical to SEQ ID NO: 342930
  chr17:25934818-25935018
  hypo
  renal vs. ovary,pancreas_gallbladder,cervical,sarcoma, anorectal,upper_gi,uterine,head_and_neck,colorectal,breast, bladder_and_urothelial,thyroid,lung,melanoma

SEQ ID NO: 477462 - DNA, 317 bp, Homo sapiens; identical to SEQ ID NO: 355619
  chr17:25936178-25936495
  hypo
  renal vs. uterine,cervical,sarcoma,head_and_neck,ovary, colorectal,thyroid,anorectal,upper_gi,lung, bladder_and_urothelial,breast,pancreas_gallbladder,melanoma, non_cancer

SEQ ID NO: 477463 - DNA, 110 bp, Homo sapiens; identical to SEQ ID NO: 367205
  chr17:26594091-26594201
  hypo
  renal vs. pancreas_gallbladder,liver_bileduct

SEQ ID NO: 477464 - DNA, 33 bp, Homo sapiens; identical to SEQ ID NO: 342953
  chr17:31099662-31099695
  hypo
  renal vs. uterine,melanoma,breast,upper_gi,colorectal

SEQ ID NO: 477465 - DNA, 37 bp, Homo sapiens; identical to SEQ ID NO: 455770
  chr17:40332770-40332807
  hypo
  renal vs. bladder_and_urothelial

SEQ ID NO: 477466 - DNA, 299 bp, Homo sapiens; identical to SEQ ID NO: 468873
  chr17:46089283-46089582
  hypo
  renal vs. bladder_and_urothelial,anorectal,prostate, colorectal,non_cancer,myeloid_neoplasm,thyroid,ovary

SEQ ID NO: 477467 - DNA, 31 bp, Homo sapiens; identical to SEQ ID NO: 348815
  chr17:46152418-46152449
  hypo
  renal vs. bladder_and_urothelial,melanoma, pancreas_gallbladder,liver_bileduct,lung,upper_gi,colorectal, anorectal,cervical,breast,head_and_neck,prostate, myeloid_neoplasm

SEQ ID NO: 477468 - DNA, 267 bp, Homo sapiens; identical to SEQ ID NO: 374206
  chr17:49008887-49009154
  hypo
  renal vs. pancreas_gallbladder

SEQ ID NO: 477469 - DNA, 298 bp, Homo sapiens; identical to SEQ ID NO: 468876
  chr17:54911482-54911780
  hypo
  renal vs. multiple_myeloma,ovary,cervical,colorectal, upper_gi,anorectal

SEQ ID NO: 477470 - DNA, 515 bp, Homo sapiens; identical to SEQ ID NO: 345534
  chr17:54911874-54912389
  hypo
  renal vs. multiple_myeloma,ovary,cervical,colorectal, upper_gi,anorectal

SEQ ID NO: 477471 - DNA, 235 bp, Homo sapiens; identical to SEQ ID NO: 343046
  chr17:59239030-59239265
  hypo
  renal vs. cervical,head_and_neck

SEQ ID NO: 477472 - DNA, 103 bp, Homo sapiens; identical to SEQ ID NO: 456628
  chr17:60766832-60766935
  hypo
  renal vs. bladder_and_urothelial,melanoma

SEQ ID NO: 477473 - DNA, 224 bp, Homo sapiens; identical to SEQ ID NO: 348823
  chr17:60767107-60767331
  hypo
  renal vs. bladder_and_urothelial,melanoma

SEQ ID NO: 477474 - DNA, 112 bp, Homo sapiens; identical to SEQ ID NO: 454237
  chr17:61777761-61777873
  hypo
  renal vs. multiple_myeloma

SEQ ID NO: 477475 - DNA, 76 bp, Homo sapiens; identical to SEQ ID NO: 345537
  chr17:61778423-61778499
  hypo
  renal vs. multiple_myeloma

SEQ ID NO: 477476 - DNA, 133 bp, Homo sapiens; identical to SEQ ID NO: 343075
  chr17:70220156-70220289
  hypo
  renal vs. sarcoma,cervical,head_and_neck,upper_gi, pancreas_gallbladder,lymphoid_neoplasm,lung,thyroid,colorectal, breast,prostate

SEQ ID NO: 477477 - DNA, 149 bp, Homo sapiens; identical to SEQ ID NO: 343110
  chr17:73635145-73635294
  hypo
  renal vs. lymphoid_neoplasm

SEQ ID NO: 477478 - DNA, 185 bp, Homo sapiens; identical to SEQ ID NO: 343121
  chr17:74042063-74042248
  hypo
  renal vs. melanoma,prostate,lymphoid_neoplasm,uterine, colorectal,sarcoma,non_cancer

SEQ ID NO: 477479 - DNA, 82 bp, Homo sapiens
  chr17:74388687-74388769
  hypo
  renal vs. liver_bileduct,lung
cgaagtgagtttttatcttatcaggtgtttttcctcataaatcattactttaagactgtattccagctgggcgcggtggttc

SEQ ID NO: 477480 - DNA, 119 bp, Homo sapiens; identical to SEQ ID NO: 465297
  chr17:74390245-74390364
  hypo
  renal vs. sarcoma,multiple_myeloma,myeloid_neoplasm, melanoma,non_cancer,prostate

SEQ ID NO: 477481 - DNA, 182 bp, Homo sapiens; identical to SEQ ID NO: 348837
  chr17:74390459-74390641
  hypo
  renal vs. sarcoma,multiple_myeloma,myeloid_neoplasm, melanoma,non_cancer,prostate

SEQ ID NO: 477482 - DNA, 127 bp, Homo sapiens; identical to SEQ ID NO: 343132
  chr17:74435202-74435329
  hypo
  renal vs. melanoma

SEQ ID NO: 477483 - DNA, 331 bp, Homo sapiens; identical to SEQ ID NO: 473007
  chr17:76187077-76187408
  hypo
  renal vs. head_and_neck,cervical,upper_gi,lung, colorectal,pancreas_gallbladder,breast,sarcoma,melanoma, bladder_and_urothelial,liver_bileduct,prostate,non_cancer

SEQ ID NO: 477484 - DNA, 138 bp, Homo sapiens; identical to SEQ ID NO: 343196
  chr17:78338197-78338335
  hypo
  renal vs. liver_bileduct

SEQ ID NO: 477485 - DNA, 522 bp, Homo sapiens; identical to SEQ ID NO: 343205
  chr17:78775515-78776037
  hypo
  renal vs. lung,upper_gi,uterine,cervical,colorectal, ovary,melanoma,head_and_neck,breast,anorectal,prostate,sarcoma, lymphoid_neoplasm,pancreas_gallbladder,thyroid, bladder_and_urothelial,non_cancer

SEQ ID NO: 477486 - DNA, 158 bp, Homo sapiens
  chr17:78872481-78872639
  hypo
  renal vs. liver_bileduct
cgccgccccgactccccccgccccggctccccccgcacctgctcacccaacccctgctcaccccgcccctgctcaccccgccgtctccgtctagtgagttttgatgatgggcttttcacttgtgttcagcttcaagctttctttctacttccattgtg

SEQ ID NO: 477487 - DNA, 268 bp, Homo sapiens; identical to SEQ ID NO: 381857
  chr17:78872734-78873002
  hypo
  renal vs. liver_bileduct

SEQ ID NO: 477488 - DNA, 253 bp, Homo sapiens; identical to SEQ ID NO: 343233
  chr17:79648960-79649213
  hypo
  renal vs. upper_gi,prostate,multiple_myeloma, bladder_and_urothelial

SEQ ID NO: 477489 - DNA, 73 bp, Homo sapiens; identical to SEQ ID NO: 343236
  chr17:79803018-79803091
  hypo
  renal vs. lung

SEQ ID NO: 477490 - DNA, 96 bp, Homo sapiens
  chr17:79826882-79826978
  hypo
  renal vs. bladder_and_urothelial,cervical, multiple_myeloma,anorectal
cgggggtcaggaactcgtactcctcggcccggggcccatagctgcctaccatgtagtcagtcttgtcaactgcggcacaaggaagagggcggtcag

SEQ ID NO: 477491 - DNA, 140 bp, Homo sapiens; identical to SEQ ID NO: 355761
  chr17:79827029-79827169
  hypo
  renal vs. bladder_and_urothelial,cervical, multiple_myeloma,anorectal

SEQ ID NO: 477492 - DNA, 169 bp, Homo sapiens; identical to SEQ ID NO: 473013
  chr17:79887422-79887591
  hypo
  renal vs. thyroid,myeloid_neoplasm

SEQ ID NO: 477493 - DNA, 56 bp, Homo sapiens; identical to SEQ ID NO: 348855
  chr17:79887849-79887905
  hypo
  renal vs. thyroid,myeloid_neoplasm

SEQ ID NO: 477494 - DNA, 515 bp, Homo sapiens
  chr17:80201427-80201942
  hypo
  renal vs. bladder_and_urothelial,melanoma,anorectal, myeloid_neoplasm,lymphoid_neoplasm,upper_gi,colorectal, pancreas_gallbladder
cgcgcccaacagaaggtcacagcgcagactctactttctggccgtgaaggttctgggtccggttgggagagtcacctgctccttggcacctcagggtgggtccttctggcctgccggcttttctgagctagtcttggcacgtggcaaggacagccccgctcctggttttaagcacaggcattcatacagacggagtgccaatccgcacaggagcattgagtgctgagaaaatggactgagtgcaaaggcagcaaggcaacaaacactacagtaaccacctctcggttcacagtcctctcccaagggaccagaaacgcatcttccaccttgaatcctgggactcccaattgtcctgctagggtctcaaagcctctgcttccaagctctcagctgcctgcccacctcctggggaagaagcgcgcagtgctttgcctggtaacacccactgcacccctgccccgcggcagcctgcggtccctaactgctctccgagggcctcaagagttcctgacagc

SEQ ID NO: 477495 - DNA, 91 bp, Homo sapiens; identical to SEQ ID NO: 355771
  chr17:80201971-80202062
  hypo
  renal vs. bladder_and_urothelial,melanoma,anorectal, myeloid_neoplasm,lymphoid_neoplasm,upper_gi,colorectal, pancreas_gallbladder

SEQ ID NO: 477496 - DNA, 121 bp, Homo sapiens; identical to SEQ ID NO: 343271
  chr17:80749629-80749750
  hypo
  renal vs. prostate

SEQ ID NO: 477497 - DNA, 238 bp, Homo sapiens; identical to SEQ ID NO: 345538
  chr18:2848166-2848404
  hypo
  renal vs. uterine,myeloid_neoplasm,thyroid,prostate

SEQ ID NO: 477498 - DNA, 533 bp, Homo sapiens; identical to SEQ ID NO: 343319
  chr18:8799980-8800513
  hypo
  renal vs. bladder_and_urothelial,head_and_neck, lymphoid_neoplasm,colorectal,prostate

SEQ ID NO: 477499 - DNA, 118 bp, Homo sapiens; identical to SEQ ID NO: 343320
  chr18:8800570-8800688
  hypo
  renal vs. lymphoid_neoplasm

SEQ ID NO: 477500 - DNA, 392 bp, Homo sapiens
  chr18:9417386-9417778
  hypo
  renal vs. colorectal
cgcccagagcaccgccacgccggccacccctggggccagtggcagggtgccaggcgtgttcacgctctgaggctccagaaattaatctgacctcttgaaagaacacattcctactgactaggaatcttgaatgaaattcaagcagtgcaggtgttcagcaattctgaagacaaaattcagacagcagagctgctgccttctctggcagatggaggagtgtccgtgaaggagggcccttcgcaccccatggagctcctgatgtccgtgcctttatcagagactctcctcctcctctctttgattgctcttttttttttttccttttttcccttttttaagagacagagtctcgctctgtcgcccaagcagctggactgccctggcctgatctc

SEQ ID NO: 477501 - DNA, 192 bp, Homo sapiens; identical to SEQ ID NO: 343337
  chr18:11992166-11992358
  hypo
  renal vs. liver_bileduct,bladder_and_urothelial, pancreas_gallbladder,breast,sarcoma,lung,lymphoid_neoplasm, prostate,myeloid_neoplasm,ovary,melanoma,upper_gi,thyroid, non_cancer,head_and_neck,anorectal,cervical

SEQ ID NO: 477502 - DNA, 160 bp, Homo sapiens; identical to SEQ ID NO: 343338
  chr18:11992771-11992931
  hypo
  renal vs. melanoma,head_and_neck,colorectal,sarcoma, breast,bladder_and_urothelial,upper_gi

SEQ ID NO: 477503 - DNA, 115 bp, Homo sapiens; identical to SEQ ID NO: 343343
  chr18:12375778-12375893
  hypo
  renal vs. multiple_myeloma

SEQ ID NO: 477504 - DNA, 33 bp, Homo sapiens; identical to SEQ ID NO: 461677
  chr18:13036746-13036779
  hypo
  renal vs. sarcoma,uterine,prostate,upper_gi,colorectal

SEQ ID NO: 477505 - DNA, 25 bp, Homo sapiens
  chr18:13036813-13036838
  hypo
  renal vs. sarcoma,uterine,prostate,upper_gi,colorectal
tggggggcaagcggtcctggggcac

SEQ ID NO: 477506 - DNA, 86 bp, Homo sapiens
  chr18:44701012-44701098
  hypo
  renal vs. lymphoid_neoplasm
cggggggacagggtgagactccgtctcaaaaaaaaaaaaaaatgggtcttcccacatccactgctttcccttccaatctttcctcc

SEQ ID NO: 477507 - DNA, 142 bp, Homo sapiens; identical to SEQ ID NO: 343402
  chr18:59728812-59728954
  hypo
  renal vs. lymphoid_neoplasm,myeloid_neoplasm

SEQ ID NO: 477508 - DNA, 183 bp, Homo sapiens; identical to SEQ ID NO: 471845
  chr18:74195379-74195562
  hypo
  renal vs. sarcoma,colorectal,thyroid

SEQ ID NO: 477509 - DNA, 14 bp, Homo sapiens
  chr18:74195591-74195605
  hypo
  renal vs. sarcoma,colorectal,thyroid
acctggtcttctcc

SEQ ID NO: 477510 - DNA, 441 bp, Homo sapiens; identical to SEQ ID NO: 343466
  chr18:76151089-76151530
  hypo
  renal vs. sarcoma

SEQ ID NO: 477511 - DNA, 271 bp, Homo sapiens; identical to SEQ ID NO: 343477
  chr18:76999776-77000047
  hypo
  renal vs. thyroid,head_and_neck,breast

SEQ ID NO: 477512 - DNA, 143 bp, Homo sapiens; identical to SEQ ID NO: 343482
  chr18:77198679-77198822
  hypo
  renal vs. cervical

SEQ ID NO: 477513 - DNA, 363 bp, Homo sapiens; identical to SEQ ID NO: 473042
  chr18:77627972-77628335
  hypo
  renal vs. anorectal,cervical,prostate,head_and_neck, colorectal,bladder_and_urothelial,melanoma

SEQ ID NO: 477514 - DNA, 122 bp, Homo sapiens; identical to SEQ ID NO: 355903
  chr18:77628470-77628592
  hypo
  renal vs. anorectal,cervical,prostate,head_and_neck, colorectal,bladder_and_urothelial,melanoma

SEQ ID NO: 477515 - DNA, 834 bp, Homo sapiens; identical to SEQ ID NO: 343521
  chr19:581325-582159
  hypo
  renal vs. liver_bileduct,cervical,breast, multiple_myeloma,lymphoid_neoplasm,melanoma,prostate, head_and_neck,thyroid,non_cancer,upper_gi

SEQ ID NO: 477516 - DNA, 743 bp, Homo sapiens; identical to SEQ ID NO: 335871
  chr19:941824-942567
  hypo
  renal vs. lymphoid_neoplasm,liver_bileduct,prostate, colorectal,myeloid_neoplasm,lung,anorectal,thyroid,non_cancer, breast,sarcoma,uterine,pancreas_gallbladder, bladder_and_urothelial

SEQ ID NO: 477517 - DNA, 72 bp, Homo sapiens
  chr19:1156143-1156215
  hypo
  renal vs. liver_bileduct
cgcctgtgtccgagtcccctaggccagcacggtgctcctggcagctcctccctccctacggtctctgagccc

SEQ ID NO: 477518 - DNA, 242 bp, Homo sapiens
  chr19:1156283-1156525
  hypo
  renal vs. liver_bileduct
gagggcttcacacatggcatgtgacctggagtccatgccttggggacctggcagggtgtggagacctggaccgggaggggatgggggcaggagaacaatgcggacaccaggcacaaccaaccaagagtcagggcccaaaaccaggaggcggaggcggaggcggatcctcacacacggctgcttggcagtctgggattcctcaagaggctaacgctggagtcaccacaccaccgagcaattcc

SEQ ID NO: 477519 - DNA, 110 bp, Homo sapiens; identical to SEQ ID NO: 367740
  chr19:1156628-1156738
  hypo
  renal vs. liver_bileduct

SEQ ID NO: 477520 - DNA, 68 bp, Homo sapiens; identical to SEQ ID NO: 343557
  chr19:1179335-1179403
  hypo
  renal vs. bladder_and_urothelial,upper_gi,colorectal, pancreas_gallbladder,liver_bileduct,uterine,breast,melanoma, lung

SEQ ID NO: 477521 - DNA, 717 bp, Homo sapiens; identical to SEQ ID NO: 367752
  chr19:1370777-1371494
  hypo
  renal vs. lymphoid_neoplasm,upper_gi,prostate,colorectal, breast,bladder_and_urothelial,liver_bileduct,sarcoma

SEQ ID NO: 477522 - DNA, 255 bp, Homo sapiens; identical to SEQ ID NO: 355938
  chr19:1423978-1424233
  hypo
  renal vs. melanoma,sarcoma,breast

SEQ ID NO: 477523 - DNA, 228 bp, Homo sapiens; identical to SEQ ID NO: 465350
  chr19:1577427-1577655
  hypo
  renal vs. liver_bileduct

SEQ ID NO: 477524 - DNA, 548 bp, Homo sapiens; identical to SEQ ID NO: 465351
  chr19:1577687-1578235
  hypo
  renal vs. liver_bileduct

SEQ ID NO: 477525 - DNA, 713 bp, Homo sapiens; identical to SEQ ID NO: 343586
  chr19:1960909-1961622
  hypo
  renal vs. liver_bileduct,head_and_neck,upper_gi, colorectal,lung,melanoma,sarcoma,pancreas_gallbladder,breast

SEQ ID NO: 477526 - DNA, 126 bp, Homo sapiens
  chr19:2244081-2244207
  hypo
  renal vs. bladder_and_urothelial,breast,uterine, anorectal,cervical,prostate,upper_gi
cgcccggctgccccagcttagggcctgcagatgggcgggtctttgggtcttcagtgtagcccatttgcttttcttgtgcctgtgtctgccttgtgcctactgctggcgtggtggcgtgggcagtgg

SEQ ID NO: 477527 - DNA, 612 bp, Homo sapiens; identical to SEQ ID NO: 355959
  chr19:2244236-2244848
  hypo
  renal vs. bladder_and_urothelial,breast,uterine, anorectal,cervical,prostate,upper_gi

SEQ ID NO: 477528 - DNA, 33 bp, Homo sapiens; identical to SEQ ID NO: 361387
  chr19:4304684-4304717
  hypo
  renal vs. bladder_and_urothelial,ovary,myeloid_neoplasm, thyroid

SEQ ID NO: 477529 - DNA, 151 bp, Homo sapiens
  chr19:4986363-4986514
  hypo
  renal vs. anorectal,sarcoma,pancreas_gallbladder, head_and_neck,liver_bileduct,upper_gi,bladder_and_urothelial
cgatggcggagtaaacgggtgatggccactgagcgctggccgtggggactcttggtcctggctgccaagtagaagcttcaggggtgctcttcacagtcagctgactctgctgtccctgatagcagaagacagcgaaggcacctgccccctg

SEQ ID NO: 477530 - DNA, 191 bp, Homo sapiens; identical to SEQ ID NO: 367838
  chr19:4986633-4986824
  hypo
  renal vs. anorectal,sarcoma,pancreas_gallbladder, head_and_neck,liver_bileduct,upper_gi,bladder_and_urothelial

SEQ ID NO: 477531 - DNA, 439 bp, Homo sapiens; identical to SEQ ID NO: 475529
  chr19:5608081-5608520
  hypo
  renal vs. melanoma,sarcoma,thyroid,lymphoid_neoplasm, cervical,head_and_neck,anorectal,non_cancer,breast

SEQ ID NO: 477532 - DNA, 229 bp, Homo sapiens; identical to SEQ ID NO: 348929
  chr19:5608569-5608798
  hypo
  renal vs. melanoma,sarcoma,thyroid,lymphoid_neoplasm, cervical,head_and_neck,anorectal,non_cancer,breast

SEQ ID NO: 477533 - DNA, 352 bp, Homo sapiens; identical to SEQ ID NO: 343699
  chr19:6744359-6744711
  hypo
  renal vs. anorectal

SEQ ID NO: 477534 - DNA, 97 bp, Homo sapiens; identical to SEQ ID NO: 367905
  chr19:10464756-10464853
  hypo
  renal vs. liver_bileduct

SEQ ID NO: 477535 - DNA, 56 bp, Homo sapiens; identical to SEQ ID NO: 343735
  chr19:10687570-10687626
  hypo
  renal vs. pancreas_gallbladder,upper_gi,lung,breast, head_and_neck,colorectal,anorectal,prostate,cervical, lymphoid_neoplasm,non_cancer,bladder_and_urothelial

SEQ ID NO: 477536 - DNA, 74 bp, Homo sapiens; identical to SEQ ID NO: 343736
  chr19:10687853-10687927
  hypo
  renal vs. bladder_and_urothelial

SEQ ID NO: 477537 - DNA, 123 bp, Homo sapiens; identical to SEQ ID NO: 460210
  chr19:10872413-10872536
  hypo
  renal vs. liver_bileduct

SEQ ID NO: 477538 - DNA, 372 bp, Homo sapiens; identical to SEQ ID NO: 343742
  chr19:10874575-10874947
  hypo
  renal vs. bladder_and_urothelial,head_and_neck,breast, cervical,lung,melanoma

SEQ ID NO: 477539 - DNA, 83 bp, Homo sapiens; identical to SEQ ID NO: 343743
  chr19:10875524-10875607
  hypo
  renal vs. sarcoma,lymphoid_neoplasm

SEQ ID NO: 477540 - DNA, 177 bp, Homo sapiens; identical to SEQ ID NO: 335952
  chr19:11199850-11200027
  hypo
  renal vs. liver_bileduct,pancreas_gallbladder,upper_gi

SEQ ID NO: 477541 - DNA, 221 bp, Homo sapiens; identical to SEQ ID NO: 454280
  chr19:12995851-12996072
  hypo
  renal vs. anorectal,breast,myeloid_neoplasm,non_cancer, thyroid

SEQ ID NO: 477542 - DNA, 190 bp, Homo sapiens; identical to SEQ ID NO: 455820
  chr19:13213427-13213617
  hypo
  renal vs. bladder_and_urothelial,cervical, pancreas_gallbladder,upper_gi,myeloid_neoplasm,thyroid, non_cancer,prostate,colorectal,multiple_myeloma,melanoma,lung, head_and_neck

SEQ ID NO: 477543 - DNA, 112 bp, Homo sapiens; identical to SEQ ID NO: 345573
  chr19:13213834-13213946
  hypo
  renal vs. bladder_and_urothelial,cervical, pancreas_gallbladder,upper_gi,myeloid_neoplasm,thyroid, non_cancer,prostate,colorectal,multiple_myeloma,melanoma,lung, head_and_neck

SEQ ID NO: 477544 - DNA, 203 bp, Homo sapiens; identical to SEQ ID NO: 343791
  chr19:13879644-13879847
  hypo
  renal vs. upper_gi,melanoma,lung,lymphoid_neoplasm, anorectal,prostate,pancreas_gallbladder,uterine,breast, liver_bileduct,head_and_neck,colorectal,bladder_and_urothelial, cervical,non_cancer

SEQ ID NO: 477545 - DNA, 240 bp, Homo sapiens; identical to SEQ ID NO: 462619
  chr19:17716539-17716779
  hypo
  renal vs. uterine,myeloid_neoplasm

SEQ ID NO: 477546 - DNA, 6 bp, Homo sapiens
  chr19:17717524-17717530
  hypo
  renal vs. uterine,myeloid_neoplasm,thyroid,non_cancer
ccgcac

SEQ ID NO: 477547 - DNA, 264 bp, Homo sapiens; identical to SEQ ID NO: 476898
  chr19:18722000-18722264
  hypo
  renal vs. ovary

SEQ ID NO: 477548 - DNA, 65 bp, Homo sapiens; identical to SEQ ID NO: 476899
  chr19:18722425-18722490
  hypo
  renal vs. ovary

SEQ ID NO: 477549 - DNA, 155 bp, Homo sapiens; identical to SEQ ID NO: 476900
  chr19:18722521-18722676
  hypo
  renal vs. ovary

SEQ ID NO: 477550 - DNA, 188 bp, Homo sapiens; identical to SEQ ID NO: 374677
  chr19:18722768-18722956
  hypo
  renal vs. ovary

SEQ ID NO: 477551 - DNA, 322 bp, Homo sapiens; identical to SEQ ID NO: 456750
  chr19:19391586-19391908
  hypo
  renal vs. upper_gi,melanoma

SEQ ID NO: 477552 - DNA, 116 bp, Homo sapiens; identical to SEQ ID NO: 343878
  chr19:19974498-19974614
  hypo
  renal vs. sarcoma,lymphoid_neoplasm,head_and_neck, colorectal,breast

SEQ ID NO: 477553 - DNA, 38 bp, Homo sapiens; identical to SEQ ID NO: 343904
  chr19:32849484-32849522
  hypo
  renal vs. liver_bileduct,pancreas_gallbladder,uterine, lymphoid_neoplasm,upper_gi,colorectal,melanoma

SEQ ID NO: 477554 - DNA, 74 bp, Homo sapiens; identical to SEQ ID NO: 343909
  chr19:33585141-33585215
  hypo
  renal vs. liver_bileduct,lung

SEQ ID NO: 477555 - DNA, 299 bp, Homo sapiens; identical to SEQ ID NO: 466814
  chr19:33791861-33792160
  hypo
  renal vs. pancreas_gallbladder

SEQ ID NO: 477556 - DNA, 197 bp, Homo sapiens; identical to SEQ ID NO: 466815
  chr19:33792630-33792827
  hypo
  renal vs. pancreas_gallbladder

SEQ ID NO: 477557 - DNA, 130 bp, Homo sapiens; identical to SEQ ID NO: 476907
  chr19:36347680-36347810
  hypo
  renal vs. multiple_myeloma

SEQ ID NO: 477558 - DNA, 35 bp, Homo sapiens; identical to SEQ ID NO: 361551
  chr19:36348065-36348100
  hypo
  renal vs. multiple_myeloma

SEQ ID NO: 477559 - DNA, 21 bp, Homo sapiens
  chr19:36478129-36478150
  hypo
  renal vs. ovary
cgttcgcgctgagctgcgcgc

SEQ ID NO: 477560 - DNA, 63 bp, Homo sapiens; identical to SEQ ID NO: 352285
  chr19:36478303-36478366
  hypo
  renal vs. ovary

SEQ ID NO: 477561 - DNA, 264 bp, Homo sapiens; identical to SEQ ID NO: 457750
  chr19:38719956-38720220
  hypo
  renal vs. ovary,sarcoma,prostate,anorectal

SEQ ID NO: 477562 - DNA, 187 bp, Homo sapiens; identical to SEQ ID NO: 352306
  chr19:38720439-38720626
  hypo
  renal vs. ovary,sarcoma,prostate,anorectal

SEQ ID NO: 477563 - DNA, 182 bp, Homo sapiens; identical to SEQ ID NO: 462644
  chr19:38852786-38852968
  hypo
  renal vs. sarcoma

SEQ ID NO: 477564 - DNA, 291 bp, Homo sapiens; identical to SEQ ID NO: 361584
  chr19:38853193-38853484
  hypo
  renal vs. sarcoma

SEQ ID NO: 477565 - DNA, 133 bp, Homo sapiens; identical to SEQ ID NO: 455015
  chr19:45603745-45603878
  hypo
  renal vs. melanoma,head_and_neck,lymphoid_neoplasm, anorectal,breast,cervical,prostate,sarcoma,non_cancer,lung, uterine,myeloid_neoplasm

SEQ ID NO: 477566 - DNA, 334 bp, Homo sapiens; identical to SEQ ID NO: 346213
  chr19:45603910-45604244
  hypo
  renal vs. melanoma,head_and_neck,lymphoid_neoplasm, anorectal,breast,cervical,prostate,sarcoma,non_cancer,lung, uterine,myeloid_neoplasm

SEQ ID NO: 477567 - DNA, 83 bp, Homo sapiens; identical to SEQ ID NO: 336190
  chr19:47676020-47676103
  hypo
  renal vs. liver_bileduct

SEQ ID NO: 477568 - DNA, 312 bp, Homo sapiens; identical to SEQ ID NO: 462655
  chr19:48901504-48901816
  hypo
  renal vs. thyroid

SEQ ID NO: 477569 - DNA, 57 bp, Homo sapiens; identical to SEQ ID NO: 344057
  chr19:50130742-50130799
  hypo
  renal vs. head_and_neck,anorectal,liver_bileduct, upper_gi,colorectal,lymphoid_neoplasm,lung,cervical, pancreas_gallbladder,sarcoma,melanoma

SEQ ID NO: 477570 - DNA, 253 bp, Homo sapiens; identical to SEQ ID NO: 344060
  chr19:50306223-50306476
  hypo
  renal vs. uterine,sarcoma,lymphoid_neoplasm, head_and_neck,anorectal,multiple_myeloma,non_cancer

SEQ ID NO: 477571 - DNA, 73 bp, Homo sapiens; identical to SEQ ID NO: 345605
  chr19:51228809-51228882
  hypo
  renal vs. melanoma

SEQ ID NO: 477572 - DNA, 486 bp, Homo sapiens; identical to SEQ ID NO: 344107
  chr19:55986223-55986709
  hypo
  renal vs. myeloid_neoplasm

SEQ ID NO: 477573 - DNA, 150 bp, Homo sapiens; identical to SEQ ID NO: 473117
  chr19:56201494-56201644
  hypo
  renal vs. melanoma,liver_bileduct,anorectal,lung, cervical,colorectal,breast,thyroid,prostate, pancreas_gallbladder,upper_gi,non_cancer,bladder_and_urothelial, myeloid_neoplasm,head_and_neck,multiple_myeloma,sarcoma

SEQ ID NO: 477574 - DNA, 18 bp, Homo sapiens
  chr19:56915935-56915953
  hypo
  renal vs. myeloid_neoplasm,uterine,non_cancer,prostate
gtttgacagtgtggaatc

SEQ ID NO: 477575 - DNA, 488 bp, Homo sapiens; identical to SEQ ID NO: 345732
  chr2:3418350-3418838
  hypo
  renal vs. liver_bileduct,lymphoid_neoplasm, bladder_and_urothelial,melanoma,anorectal,multiple_myeloma, pancreas_gallbladder,head_and_neck,breast,upper_gi,colorectal, prostate,non_cancer,cervical,lung,uterine,sarcoma,
  CONT. FROM ABOVE: myeloid_neoplasm

SEQ ID NO: 477576 - DNA, 614 bp, Homo sapiens; identical to SEQ ID NO: 337537
  chr2:10334473-10335087
  hypo
  renal vs. pancreas_gallbladder,melanoma,cervical,breast

SEQ ID NO: 477577 - DNA, 203 bp, Homo sapiens; identical to SEQ ID NO: 337540
  chr2:10517952-10518155
  hypo
  renal vs. liver_bileduct

SEQ ID NO: 477578 - DNA, 101 bp, Homo sapiens; identical to SEQ ID NO: 353080
  chr2:15783084-15783185
  hypo
  renal vs. colorectal,melanoma,bladder_and_urothelial, liver_bileduct,upper_gi,pancreas_gallbladder,anorectal,breast, prostate,lung

SEQ ID NO: 477579 - DNA, 93 bp, Homo sapiens; identical to SEQ ID NO: 362840
  chr2:20456228-20456321
  hypo
  renal vs. multiple_myeloma,breast

SEQ ID NO: 477580 - DNA, 59 bp, Homo sapiens; identical to SEQ ID NO: 455879
  chr2:27938267-27938326
  hypo
  renal vs. ovary

SEQ ID NO: 477581 - DNA, 38 bp, Homo sapiens; identical to SEQ ID NO: 454314
  chr2:30453530-30453568
  hypo
  renal vs. ovary

SEQ ID NO: 477582 - DNA, 686 bp, Homo sapiens; identical to SEQ ID NO: 337611
  chr2:44553759-44554445
  hypo
  renal vs. liver_bileduct,melanoma,colorectal,upper_gi, bladder_and_urothelial,lung,pancreas_gallbladder,prostate, lymphoid_neoplasm,cervical,non_cancer

SEQ ID NO: 477583 - DNA, 276 bp, Homo sapiens; identical to SEQ ID NO: 462693
  chr2:74425444-74425720
  hypo
  renal vs. ovary,lymphoid_neoplasm,bladder_and_urothelial, uterine

SEQ ID NO: 477584 - DNA, 396 bp, Homo sapiens; identical to SEQ ID NO: 462694
  chr2:74425790-74426186
  hypo
  renal vs. ovary,lymphoid_neoplasm,bladder_and_urothelial, uterine

SEQ ID NO: 477585 - DNA, 228 bp, Homo sapiens; identical to SEQ ID NO: 345018
  chr2:74426214-74426442
  hypo
  renal vs. ovary,lymphoid_neoplasm,bladder_and_urothelial, uterine

SEQ ID NO: 477586 - DNA, 198 bp, Homo sapiens; identical to SEQ ID NO: 337666
  chr2:85871996-85872194
  hypo
  renal vs. bladder_and_urothelial

SEQ ID NO: 477587 - DNA, 95 bp, Homo sapiens; identical to SEQ ID NO: 337667
  chr2:85878703-85878798
  hypo
  renal vs. liver_bileduct,lymphoid_neoplasm,upper_gi, pancreas_gallbladder,head_and_neck,ovary,lung,prostate, anorectal,breast,uterine

SEQ ID NO: 477588 - DNA, 43 bp, Homo sapiens; identical to SEQ ID NO: 462703
  chr2:97203334-97203377
  hypo
  renal vs. multiple_myeloma,sarcoma,cervical

SEQ ID NO: 477589 - DNA, 39 bp, Homo sapiens; identical to SEQ ID NO: 346465
  chr2:97203545-97203584
  hypo
  renal vs. multiple_myeloma,sarcoma,cervical

SEQ ID NO: 477590 - DNA, 86 bp, Homo sapiens
  chr2:106730126-106730212
  hypo
  renal vs. sarcoma,breast,lymphoid_neoplasm,cervical, melanoma
cgtatctaatgtttgatccactgcagaacaaacgtgcactttctgggcacctgagggcagggagcctggggcgtgaggacctgggc

SEQ ID NO: 477591 - DNA, 160 bp, Homo sapiens; identical to SEQ ID NO: 353150
  chr2:106730256-106730416
  hypo
  renal vs. sarcoma,breast,lymphoid_neoplasm,cervical, melanoma

SEQ ID NO: 477592 - DNA, 268 bp, Homo sapiens; identical to SEQ ID NO: 362988
  chr2:127895375-127895643
  hypo
  renal vs. pancreas_gallbladder,head_and_neck

SEQ ID NO: 477593 - DNA, 51 bp, Homo sapiens; identical to SEQ ID NO: 453124
  chr2:149632592-149632643
  hypo
  renal vs. sarcoma,ovary,prostate

SEQ ID NO: 477594 - DNA, 9 bp, Homo sapiens
  chr2:160760627-160760636
  hypo
  renal vs. lymphoid_neoplasm
cgggaatcg

SEQ ID NO: 477595 - DNA, 133 bp, Homo sapiens; identical to SEQ ID NO: 337806
  chr2:171730981-171731114
  hypo
  renal vs. bladder_and_urothelial,cervical, lymphoid_neoplasm,pancreas_gallbladder,colorectal,head_and_neck, anorectal,liver_bileduct,prostate,upper_gi,melanoma,lung, non_cancer,sarcoma

SEQ ID NO: 477596 - DNA, 15 bp, Homo sapiens
  chr2:171822495-171822510
  hypo
  renal vs. lung,breast,lymphoid_neoplasm,sarcoma,upper_gi, colorectal,cervical,uterine,prostate,anorectal, bladder_and_urothelial,melanoma,liver_bileduct,myeloid_neoplasm, head_and_neck,multiple_myeloma,non_cancer
cgctgcctcctcact

SEQ ID NO: 477597 - DNA, 632 bp, Homo sapiens; identical to SEQ ID NO: 353201
  chr2:171822567-171823199
  hypo
  renal vs. lung,breast,lymphoid_neoplasm,sarcoma,upper_gi, colorectal,cervical,uterine,prostate,anorectal, bladder_and_urothelial,melanoma,liver_bileduct,myeloid_neoplasm, head_and_neck,multiple_myeloma,non_cancer

SEQ ID NO: 477598 - DNA, 204 bp, Homo sapiens; identical to SEQ ID NO: 353208
  chr2:191796737-191796941
  hypo
  renal vs. colorectal,pancreas_gallbladder,lung,uterine, ovary,upper_gi,breast,bladder_and_urothelial,head_and_neck, prostate,lymphoid_neoplasm

SEQ ID NO: 477599 - DNA, 433 bp, Homo sapiens; identical to SEQ ID NO: 369923
  chr2:219748345-219748778
  hypo

SEQ ID NO: 477600 - DNA, 42 bp, Homo sapiens; identical to SEQ ID NO: 476975
  chr2:219857682-219857724
  hypo
  renal vs. ovary

SEQ ID NO: 477601 - DNA, 211 bp, Homo sapiens; identical to SEQ ID NO: 337925
  chr2:236949342-236949553
  hypo
  renal vs. ovary,upper_gi

SEQ ID NO: 477602 - DNA, 34 bp, Homo sapiens; identical to SEQ ID NO: 337934
  chr2:238934785-238934819
  hypo
  renal vs. pancreas_gallbladder,breast

SEQ ID NO: 477603 - DNA, 121 bp, Homo sapiens; identical to SEQ ID NO: 473157
  chr2:240167455-240167576
  hypo
  renal vs. melanoma

SEQ ID NO: 477604 - DNA, 310 bp, Homo sapiens; identical to SEQ ID NO: 353257
  chr2:240167605-240167915
  hypo
  renal vs. melanoma

SEQ ID NO: 477605 - DNA, 49 bp, Homo sapiens; identical to SEQ ID NO: 363148
  chr2:240169135-240169184
  hypo
  renal vs. lymphoid_neoplasm,thyroid,prostate

SEQ ID NO: 477606 - DNA, 463 bp, Homo sapiens; identical to SEQ ID NO: 455098
  chr2:242004407-242004870
  hypo
  renal vs. sarcoma

SEQ ID NO: 477607 - DNA, 339 bp, Homo sapiens; identical to SEQ ID NO: 337986
  chr2:242169887-242170226
  hypo
  renal vs. head_and_neck,colorectal,cervical,sarcoma, melanoma,breast,bladder_and_urothelial,lung,prostate, pancreas_gallbladder,upper_gi,non_cancer,liver_bileduct,uterine

SEQ ID NO: 477608 - DNA, 276 bp, Homo sapiens; identical to SEQ ID NO: 337996
  chr2:242566832-242567108
  hypo
  renal vs. liver_bileduct,pancreas_gallbladder,melanoma, lymphoid_neoplasm

SEQ ID NO: 477609 - DNA, 236 bp, Homo sapiens; identical to SEQ ID NO: 344146
  chr20:371973-372209
  hypo
  renal vs. bladder_and_urothelial,melanoma, pancreas_gallbladder,lung,anorectal,upper_gi,cervical, liver_bileduct,colorectal,breast,head_and_neck,thyroid,uterine, prostate,non_cancer,sarcoma,multiple_myeloma,lymphoid_neoplasm,
  CONT. FROM ABOVE: ovary,myeloid_neoplasm

SEQ ID NO: 477610 - DNA, 102 bp, Homo sapiens; identical to SEQ ID NO: 465477
  chr20:400915-401017
  hypo

SEQ ID NO: 477611 - DNA, 127 bp, Homo sapiens; identical to SEQ ID NO: 344171
  chr20:13417399-13417526
  hypo
  renal vs. cervical

SEQ ID NO: 477612 - DNA, 238 bp, Homo sapiens
  chr20:25320332-25320570
  hypo
  renal vs. lymphoid_neoplasm,melanoma,cervical
cgtatcaggaaagagcggcctcctcaggcctcccgatccgtcttctgtgagacaactgcaggcaggcgtaggttacttattagctcctggtaggaagcacgtagaccaaggacatcaacagaacctgcctgaccaggtcctcagagagcaggaggctaagaactggcacggtgtgtccttgcatttacgcgtgggcgagcccctctgtacccacccaacagaggacccttttccaggc

SEQ ID NO: 477613 - DNA, 113 bp, Homo sapiens; identical to SEQ ID NO: 344193
  chr20:30139516-30139629
  hypo
  renal vs. anorectal,upper_gi,lung,liver_bileduct, head_and_neck,pancreas_gallbladder,colorectal,breast,cervical, bladder_and_urothelial

SEQ ID NO: 477614 - DNA, 138 bp, Homo sapiens
  chr20:33183813-33183951
  hypo
  renal vs. pancreas_gallbladder
cgatggagcgagaccctgtctcaaaaacaaaacaaaacaaaaaaagttacagtggagaaacctggcagacactaacgtcaccaagtgatcaaggtaaacattagcattgagaagatatggcaatatcatgaacccctc

SEQ ID NO: 477615 - DNA, 436 bp, Homo sapiens; identical to SEQ ID NO: 473181
  chr20:35443740-35444176
  hypo
  renal vs. liver_bileduct

SEQ ID NO: 477616 - DNA, 381 bp, Homo sapiens; identical to SEQ ID NO: 346230
  chr20:35444205-35444586
  hypo
  renal vs. liver_bileduct

SEQ ID NO: 477617 - DNA, 390 bp, Homo sapiens; identical to SEQ ID NO: 455936
  chr20:37433723-37434113
  hypo
  renal vs. ovary,multiple_myeloma

SEQ ID NO: 477618 - DNA, 27 bp, Homo sapiens
  chr20:37434086-37434113
  hypo
  renal vs. multiple_myeloma,ovary
cggggtgggggttaggaaaactatttt

SEQ ID NO: 477619 - DNA, 50 bp, Homo sapiens; identical to SEQ ID NO: 356294
  chr20:47766299-47766349
  hypo
  renal vs. upper_gi,cervical,breast,liver_bileduct, melanoma,bladder_and_urothelial

SEQ ID NO: 477620 - DNA, 70 bp, Homo sapiens; identical to SEQ ID NO: 344293
  chr20:49284107-49284177
  hypo
  renal vs. liver_bileduct,pancreas_gallbladder

SEQ ID NO: 477621 - DNA, 18 bp, Homo sapiens
  chr20:49286725-49286743
  hypo
  renal vs. myeloid_neoplasm,prostate
cgctctgagccaaggtag

SEQ ID NO: 477622 - DNA, 113 bp, Homo sapiens; identical to SEQ ID NO: 345643
  chr20:57225466-57225579
  hypo
  renal vs. myeloid_neoplasm,thyroid,non_cancer, multiple_myeloma

SEQ ID NO: 477623 - DNA, 119 bp, Homo sapiens; identical to SEQ ID NO: 344318
  chr20:57240808-57240927
  hypo
  renal vs. multiple_myeloma,liver_bileduct

SEQ ID NO: 477624 - DNA, 433 bp, Homo sapiens
  chr20:57571504-57571937
  hypo
  renal vs. breast,melanoma,cervical,prostate, bladder_and_urothelial,head_and_neck,sarcoma,non_cancer,lung, upper_gi,pancreas_gallbladder,anorectal,colorectal
cggcagccgcgcatgtcagagaagggtctggccccaaaagccactcgcgcggtggctgagacagctggagcaaggaaccctctgtcaaggccccagtttttagctaaacgtaaacagaaccattcaagcgagaggagtaccaggacgtttttttctaggaatgaccttaagaaaatgaaaacatcttacccatggttcaccccatgaattccggacaatccagtactcagtcccatcactgatgccccacccagccacagaaacgacatggtttatatatgtggtgtcctggtattcggcatagatgcctccggtgtagttagccagtctttctgttgccattattccacagctgagagcaagcagttaaagaattaccacttttaaattgagagaatttaccgtcattagaaataatctgatatggctgggc

SEQ ID NO: 477625 - DNA, 124 bp, Homo sapiens; identical to SEQ ID NO: 456878
  chr20:61838301-61838425
  hypo
  renal vs. lymphoid_neoplasm,anorectal,myeloid_neoplasm, thyroid,non_cancer,sarcoma,prostate,melanoma,head_and_neck

SEQ ID NO: 477626 - DNA, 25 bp, Homo sapiens
  chr20:61838523-61838548
  hypo
  renal vs. lymphoid_neoplasm,anorectal,myeloid_neoplasm, thyroid,non_cancer,sarcoma,prostate,melanoma,head_and_neck
atacagctgcattaaccccgggcac

SEQ ID NO: 477627 - DNA, 495 bp, Homo sapiens; identical to SEQ ID NO: 473212
  chr20:62248627-62249122
  hypo
  renal vs. melanoma,liver_bileduct

SEQ ID NO: 477628 - DNA, 48 bp, Homo sapiens; identical to SEQ ID NO: 476993
  chr21:15588309-15588357
  hypo
  renal vs. prostate,thyroid

SEQ ID NO: 477629 - DNA, 66 bp, Homo sapiens; identical to SEQ ID NO: 375197
  chr21:15588911-15588977
  hypo
  renal vs. prostate,thyroid

SEQ ID NO: 477630 - DNA, 255 bp, Homo sapiens; identical to SEQ ID NO: 344458
  chr21:35258647-35258902
  hypo
  renal vs. sarcoma,thyroid

SEQ ID NO: 477631 - DNA, 299 bp, Homo sapiens; identical to SEQ ID NO: 344467
  chr21:37617467-37617766
  hypo
  renal vs. colorectal,bladder_and_urothelial

SEQ ID NO: 477632 - DNA, 396 bp, Homo sapiens; identical to SEQ ID NO: 356399
  chr21:43547667-43548063
  hypo
  renal vs. colorectal,lymphoid_neoplasm,cervical, non_cancer,melanoma,breast,prostate,anorectal,lung

SEQ ID NO: 477633 - DNA, 703 bp, Homo sapiens; identical to SEQ ID NO: 344535
  chr21:45345807-45346510
  hypo
  renal vs. liver_bileduct,pancreas_gallbladder,colorectal

SEQ ID NO: 477634 - DNA, 173 bp, Homo sapiens; identical to SEQ ID NO: 344560
  chr21:46270497-46270670
  hypo
  renal vs. liver_bileduct,lung

SEQ ID NO: 477635 - DNA, 68 bp, Homo sapiens; identical to SEQ ID NO: 472087
  chr21:47689571-47689639
  hypo
  renal vs. melanoma,upper_gi,head_and_neck,colorectal, cervical,prostate,thyroid,non_cancer,lymphoid_neoplasm,sarcoma, multiple_myeloma,liver_bileduct,anorectal, bladder_and_urothelial,breast,uterine,pancreas_gallbladder,lung

SEQ ID NO: 477636 - DNA, 129 bp, Homo sapiens; identical to SEQ ID NO: 346275
  chr21:47689700-47689829
  hypo
  renal vs. melanoma,upper_gi,head_and_neck,colorectal, cervical,prostate,thyroid,non_cancer,lymphoid_neoplasm,sarcoma, multiple_myeloma,liver_bileduct,anorectal, bladder_and_urothelial,breast,uterine,pancreas_gallbladder,lung

SEQ ID NO: 477637 - DNA, 221 bp, Homo sapiens; identical to SEQ ID NO: 344651
  chr21:47872870-47873091
  hypo
  renal vs. anorectal,pancreas_gallbladder,lung

SEQ ID NO: 477638 - DNA, 91 bp, Homo sapiens; identical to SEQ ID NO: 476996
  chr21:48087109-48087200
  hypo
  renal vs. ovary

SEQ ID NO: 477639 - DNA, 542 bp, Homo sapiens; identical to SEQ ID NO: 344661
  chr22:18443260-18443802
  hypo
  renal vs. liver_bileduct,bladder_and_urothelial, head_and_neck

SEQ ID NO: 477640 - DNA, 66 bp, Homo sapiens; identical to SEQ ID NO: 344682
  chr22:22029114-22029180
  hypo
  renal vs. melanoma,anorectal,uterine,upper_gi,lung, head_and_neck,thyroid,colorectal,sarcoma,breast, pancreas_gallbladder

SEQ ID NO: 477641 - DNA, 170 bp, Homo sapiens; identical to SEQ ID NO: 344684
  chr22:22037104-22037274
  hypo
  renal vs. liver_bileduct

SEQ ID NO: 477642 - DNA, 137 bp, Homo sapiens; identical to SEQ ID NO: 453177
  chr22:22862472-22862609
  hypo
  renal vs. uterine

SEQ ID NO: 477643 - DNA, 187 bp, Homo sapiens; identical to SEQ ID NO: 295268
  chr22:24552924-24553111
  hypo
  renal vs. sarcoma,multiple_myeloma,melanoma,anorectal, myeloid_neoplasm,non_cancer,thyroid,lymphoid_neoplasm,breast, bladder_and_urothelial

SEQ ID NO: 477644 - DNA, 112 bp, Homo sapiens; identical to SEQ ID NO: 368779
  chr22:36907702-36907814
  hypo
  renal vs. liver_bileduct

SEQ ID NO: 477645 - DNA, 190 bp, Homo sapiens; identical to SEQ ID NO: 344783
  chr22:41536192-41536382
  hypo
  renal vs. bladder_and_urothelial

SEQ ID NO: 477646 - DNA, 23 bp, Homo sapiens
  chr22:41839279-41839302
  hypo
  renal vs. sarcoma
cgcgcgcgcatgtgtctgcctgc

SEQ ID NO: 477647 - DNA, 2 bp, Homo sapiens
  chr22:41839382-41839384
  hypo
  renal vs. sarcoma
gc

SEQ ID NO: 477648 - DNA, 550 bp, Homo sapiens; identical to SEQ ID NO: 383516
  chr22:41970751-41971301
  hypo
  renal vs. liver_bileduct

SEQ ID NO: 477649 - DNA, 137 bp, Homo sapiens; identical to SEQ ID NO: 344792
  chr22:41973298-41973435
  hypo
  renal vs. breast,melanoma,liver_bileduct,prostate, anorectal,non_cancer,cervical,head_and_neck,thyroid

SEQ ID NO: 477650 - DNA, 74 bp, Homo sapiens
  chr22:44500148-44500222
  hypo
  renal vs. thyroid,prostate,uterine,breast
cgtctcaaagcaggctggcagacattttccactcttgatcaatcattttccaaaataagcatagacacagcaac

SEQ ID NO: 477651 - DNA, 24 bp, Homo sapiens
  chr22:44500269-44500293
  hypo
  renal vs. thyroid,prostate,uterine,breast
agtggtggcacagaggcgatatac

SEQ ID NO: 477652 - DNA, 32 bp, Homo sapiens
  chr22:46585892-46585924
  hypo
  renal vs. liver_bileduct,pancreas_gallbladder, head_and_neck,lung,upper_gi,colorectal,ovary,lymphoid_neoplasm, bladder_and_urothelial,sarcoma,cervical,breast,melanoma
cgcccagccgtgttcatctatttctgtgaacc

SEQ ID NO: 477653 - DNA, 110 bp, Homo sapiens; identical to SEQ ID NO: 338024
  chr3:10131952-10132062
  hypo
  renal vs. lymphoid_neoplasm

SEQ ID NO: 477654 - DNA, 163 bp, Homo sapiens
  chr3:14514245-14514408
  hypo
  renal vs. head_and_neck,breast
cgattcggagaagggacccacatttctgtgtgagctgatcattgtctgggccatcgtaataagttgcaagtgcccaggagaagcctacgccacactcaggattctgtgctccctggagcgtgcgaggggctgggcattggctccctcccgtgctttatacacc

SEQ ID NO: 477655 - DNA, 557 bp, Homo sapiens; identical to SEQ ID NO: 347983
  chr3:49720262-49720819
  hypo
  renal vs. liver_bileduct,melanoma,lung,upper_gi, bladder_and_urothelial,anorectal

SEQ ID NO: 477656 - DNA, 234 bp, Homo sapiens; identical to SEQ ID NO: 453203
  chr3:49906737-49906971
  hypo
  renal vs. uterine

SEQ ID NO: 477657 - DNA, 49 bp, Homo sapiens; identical to SEQ ID NO: 349768
  chr3:49907379-49907428
  hypo
  renal vs. uterine

SEQ ID NO: 477658 - DNA, 92 bp, Homo sapiens; identical to SEQ ID NO: 353355
  chr3:107530307-107530399
  hypo
  renal vs. melanoma,pancreas_gallbladder,lung, head_and_neck,upper_gi,breast,lymphoid_neoplasm, bladder_and_urothelial

SEQ ID NO: 477659 - DNA, 832 bp, Homo sapiens; identical to SEQ ID NO: 345097
  chr3:113251180-113252012
  hypo
  renal vs. uterine,multiple_myeloma,cervical,ovary, anorectal,myeloid_neoplasm,upper_gi,breast,prostate,non_cancer, thyroid,lung,pancreas_gallbladder,colorectal

SEQ ID NO: 477660 - DNA, 824 bp, Homo sapiens; identical to SEQ ID NO: 469142
  chr3:113251532-113252356
  hypo
  renal vs. multiple_myeloma,uterine,cervical,anorectal, myeloid_neoplasm,non_cancer,thyroid,breast,upper_gi,lung, bladder_and_urothelial

SEQ ID NO: 477661 - DNA, 84 bp, Homo sapiens; identical to SEQ ID NO: 345809
  chr3:121500635-121500719
  hypo
  renal vs. liver_bileduct,lung,bladder_and_urothelial, head_and_neck,sarcoma,pancreas_gallbladder,colorectal,cervical, breast,lymphoid_neoplasm,uterine,upper_gi,prostate

SEQ ID NO: 477662 - DNA, 13 bp, Homo sapiens
  chr3:138679565-138679578
  hypo
  renal vs. myeloid_neoplasm,thyroid
cgggcacagacgc

SEQ ID NO: 477663 - DNA, 86 bp, Homo sapiens; identical to SEQ ID NO: 458017
  chr3:150802802-150802888
  hypo
  renal vs. ovary

SEQ ID NO: 477664 - DNA, 191 bp, Homo sapiens; identical to SEQ ID NO: 338242
  chr3:171362739-171362930
  hypo
  renal vs. upper_gi

SEQ ID NO: 477665 - DNA, 83 bp, Homo sapiens; identical to SEQ ID NO: 338243
  chr3:171976039-171976122
  hypo
  renal vs. melanoma,lung,bladder_and_urothelial,breast, head_and_neck,lymphoid_neoplasm

SEQ ID NO: 477666 - DNA, 291 bp, Homo sapiens; identical to SEQ ID NO: 453235
  chr3:186079331-186079622
  hypo
  renal vs. multiple_myeloma

SEQ ID NO: 477667 - DNA, 125 bp, Homo sapiens; identical to SEQ ID NO: 453236
  chr3:186079497-186079622
  hypo
  renal vs. ovary

SEQ ID NO: 477668 - DNA, 324 bp, Homo sapiens; identical to SEQ ID NO: 338308
  chr3:194048948-194049272
  hypo
  renal vs. myeloid_neoplasm,thyroid

SEQ ID NO: 477669 - DNA, 49 bp, Homo sapiens; identical to SEQ ID NO: 345828
  chr3:195601363-195601412
  hypo
  renal vs. melanoma

SEQ ID NO: 477670 - DNA, 13 bp, Homo sapiens
  chr4:759725-759738
  hypo
  renal vs. ovary
cgggacgtgattc

SEQ ID NO: 477671 - DNA, 328 bp, Homo sapiens; identical to SEQ ID NO: 363466
  chr4:759841-760169
  hypo
  renal vs. ovary

SEQ ID NO: 477672 - DNA, 667 bp, Homo sapiens
  chr4:1317011-1317678
  hypo
  renal vs. anorectal,melanoma
cgtgagccaccgtgcccggccgagtaccgacttttgtagagaccaaaagaagcttaagaaatggactcctaaaggacaaaatttaaacctgcttattaaaaggcattgtcaccctaggggcttgcagaaatgttttaacttatgttaacacttctgcctccattagcaaaacttttctgtcttctaaactgagcgctgctttaacctcaccctggctgagtttggcagggtgcacgcagttaccagccaggagtgacacactgccactcagggccgccaaaacaagcacgaagcaaagacgggacgaaaaagtagagcggctagtagctcccctaaagagagtttggaccttggtatggaaaccctaaaaggaaagccagaattggtatgtaacctgcggccccactacacagtgccagccccacactccctcccagagagccggcacacacctcacagtgggaactctgccagggctgtttcctgtggatgtcagagggaagataggttcttggtgctgccaggatattcctgcaagccctaattacctgccggacagtgttgctggagggtgttggaggcttgccacgagcacacgacctgtctgaagctgctgtggggacaggcagggccaggactcggggccctgaatgcatgcctgggggac

SEQ ID NO: 477673 - DNA, 129 bp, Homo sapiens; identical to SEQ ID NO: 338373
  chr4:1326104-1326233
  hypo
  renal vs. liver_bileduct

SEQ ID NO: 477674 - DNA, 167 bp, Homo sapiens; identical to SEQ ID NO: 338374
  chr4:1326509-1326676
  hypo
  renal vs. liver_bileduct

SEQ ID NO: 477675 - DNA, 57 bp, Homo sapiens; identical to SEQ ID NO: 456997
  chr4:1993659-1993716
  hypo
  renal vs. lymphoid_neoplasm,sarcoma

SEQ ID NO: 477676 - DNA, 197 bp, Homo sapiens; identical to SEQ ID NO: 348041
  chr4:1994335-1994532
  hypo
  renal vs. lymphoid_neoplasm,sarcoma

SEQ ID NO: 477677 - DNA, 25 bp, Homo sapiens
  chr4:10459327-10459352
  hypo
  renal vs. sarcoma
gggtcccgcggagggcggccttggc

SEQ ID NO: 477678 - DNA, 180 bp, Homo sapiens; identical to SEQ ID NO: 338476
  chr4:40485408-40485588
  hypo
  renal vs. bladder_and_urothelial

SEQ ID NO: 477679 - DNA, 56 bp, Homo sapiens; identical to SEQ ID NO: 338514
  chr4:87946924-87946980
  hypo

SEQ ID NO: 477680 - DNA, 90 bp, Homo sapiens; identical to SEQ ID NO: 338515
  chr4:87993079-87993169
  hypo
  renal vs. ovary,bladder_and_urothelial,upper_gi, liver_bileduct,cervical,head_and_neck,sarcoma,melanoma, colorectal,breast,lung,anorectal,uterine,pancreas_gallbladder, prostate

SEQ ID NO: 477681 - DNA, 168 bp, Homo sapiens; identical to SEQ ID NO: 338523
  chr4:103421142-103421310
  hypo
  renal vs. anorectal,bladder_and_urothelial,melanoma, prostate,upper_gi,pancreas_gallbladder,non_cancer,lung, lymphoid_neoplasm,colorectal,breast,head_and_neck,cervical, multiple_myeloma,myeloid_neoplasm,sarcoma,liver_bileduct

SEQ ID NO: 477682 - DNA, 693 bp, Homo sapiens; identical to SEQ ID NO: 477031
  chr4:103997179-103997872
  hypo
  renal vs. sarcoma,uterine,anorectal,upper_gi,ovary, myeloid_neoplasm,lymphoid_neoplasm,non_cancer, bladder_and_urothelial,head_and_neck,multiple_myeloma,breast, prostate

SEQ ID NO: 477683 - DNA, 144 bp, Homo sapiens; identical to SEQ ID NO: 338563
  chr4:170043204-170043348
  hypo
  renal vs. sarcoma,lung

SEQ ID NO: 477684 - DNA, 365 bp, Homo sapiens; identical to SEQ ID NO: 332268
  chr4:185747631-185747996
  hypo
  renal vs. bladder_and_urothelial,upper_gi

SEQ ID NO: 477685 - DNA, 829 bp, Homo sapiens; identical to SEQ ID NO: 346671
  chr5:472600-473429
  hypo
  renal vs. liver_bileduct,head_and_neck,breast, lymphoid_neoplasm,anorectal,uterine,bladder_and_urothelial,lung, myeloid_neoplasm,thyroid,sarcoma,ovary,multiple_myeloma

SEQ ID NO: 477686 - DNA, 966 bp, Homo sapiens; identical to SEQ ID NO: 469215
  chr5:472934-473900
  hypo
  renal vs. liver_bileduct

SEQ ID NO: 477687 - DNA, 829 bp, Homo sapiens; identical to SEQ ID NO: 469216
  chr5:473431-474260
  hypo
  renal vs. liver_bileduct,head_and_neck

SEQ ID NO: 477688 - DNA, 73 bp, Homo sapiens; identical to SEQ ID NO: 338702
  chr5:10702280-10702353
  hypo
  renal vs. head_and_neck

SEQ ID NO: 477689 - DNA, 479 bp, Homo sapiens; identical to SEQ ID NO: 477038
  chr5:31854462-31854941
  hypo
  renal vs. ovary,lung,uterine,multiple_myeloma,anorectal, myeloid_neoplasm,pancreas_gallbladder,breast, bladder_and_urothelial,head_and_neck,cervical,non_cancer

SEQ ID NO: 477690 - DNA, 70 bp, Homo sapiens; identical to SEQ ID NO: 477039
  chr5:31854871-31854941
  hypo
  renal vs. anorectal,cervical,ovary,lung,uterine, bladder_and_urothelial,breast,pancreas_gallbladder, multiple_myeloma,non_cancer,thyroid,myeloid_neoplasm,prostate, head_and_neck

SEQ ID NO: 477691 - DNA, 50 bp, Homo sapiens; identical to SEQ ID NO: 345162
  chr5:49737299-49737349
  hypo
  renal vs. multiple_myeloma,thyroid,prostate, myeloid_neoplasm,non_cancer,lymphoid_neoplasm,anorectal, bladder_and_urothelial,pancreas_gallbladder,ovary

SEQ ID NO: 477692 - DNA, 143 bp, Homo sapiens; identical to SEQ ID NO: 338734
  chr5:71714802-71714945
  hypo
  renal vs. ovary,breast,lung

SEQ ID NO: 477693 - DNA, 53 bp, Homo sapiens; identical to SEQ ID NO: 453291
  chr5:75698192-75698245
  hypo
  renal vs. ovary

SEQ ID NO: 477694 - DNA, 916 bp, Homo sapiens; identical to SEQ ID NO: 453292
  chr5:75698274-75699190
  hypo
  renal vs. ovary

SEQ ID NO: 477695 - DNA, 80 bp, Homo sapiens; identical to SEQ ID NO: 338746
  chr5:76327297-76327377
  hypo
  renal vs. sarcoma,melanoma

SEQ ID NO: 477696 - DNA, 44 bp, Homo sapiens
  chr5:78105396-78105440
  hypo
  renal vs. bladder_and_urothelial,melanoma,colorectal, prostate
cggcacttcttgccttcagctgaagctgggagacccatcctacg

SEQ ID NO: 477697 - DNA, 70 bp, Homo sapiens; identical to SEQ ID NO: 353624
  chr5:78105545-78105615
  hypo
  renal vs. bladder_and_urothelial,melanoma,colorectal, prostate

SEQ ID NO: 477698 - DNA, 102 bp, Homo sapiens; identical to SEQ ID NO: 338761
  chr5:90670755-90670857
  hypo
  renal vs. lymphoid_neoplasm,anorectal

SEQ ID NO: 477699 - DNA, 52 bp, Homo sapiens; identical to SEQ ID NO: 338762
  chr5:90672526-90672578
  hypo
  renal vs. upper_gi,lymphoid_neoplasm,melanoma,colorectal, prostate,pancreas_gallbladder,breast

SEQ ID NO: 477700 - DNA, 72 bp, Homo sapiens
  chr5:96362713-96362785
  hypo
  renal vs. lung,liver_bileduct,upper_gi,ovary,colorectal, pancreas_gallbladder,lymphoid_neoplasm
cgtggctacagactatttcatagcaaccatttagctatgcatattgaaaaatacctctgtatggccgggcgc

SEQ ID NO: 477701 - DNA, 309 bp, Homo sapiens; identical to SEQ ID NO: 338773
  chr5:107703589-107703898
  hypo
  renal vs. liver_bileduct,breast,colorectal, pancreas_gallbladder,upper_gi,uterine

SEQ ID NO: 477702 - DNA, 497 bp, Homo sapiens; identical to SEQ ID NO: 338778
  chr5:115783187-115783684
  hypo
  renal vs. melanoma,head_and_neck,colorectal,uterine, thyroid,upper_gi,bladder_and_urothelial,prostate,anorectal,lung, cervical,breast,sarcoma

SEQ ID NO: 477703 - DNA, 160 bp, Homo sapiens; identical to SEQ ID NO: 338787
  chr5:131037398-131037558
  hypo
  renal vs. bladder_and_urothelial,uterine,head_and_neck, colorectal,upper_gi,breast,lung,cervical

SEQ ID NO: 477704 - DNA, 432 bp, Homo sapiens
  chr5:131607799-131608231
  hypo
  renal vs. anorectal,sarcoma,uterine,cervical,prostate
cgtggttacttctttctggacgagcggctctactgtgagagccacgccaaggcgcgcgtgaagccgcccgagggctacgacgtggtggcggtgtaccccaatgccaaggtggaactcgtctgagctgggaccctgctcccacgcctgcttcttaaggtccctgctcggccggtgtaaatatgtttcaccctgtccctctaataaagctcctctgctccaccttgaacctgtcacctggcctgccaccctcctgcgcaggccatgcatggctcccgagtacagtagtatctgcttaggtgccaggcatgtcctaggctctgggtgcagtagtgagcaggacgggtaccatgctgccctgaagggggccacagcctgggtggaaggcagacctgaatcacaacgggccagctctagtaatacgaaggtgaggtc

SEQ ID NO: 477705 - DNA, 63 bp, Homo sapiens; identical to SEQ ID NO: 353650
  chr5:134273891-134273954
  hypo
  renal vs. liver_bileduct,upper_gi

SEQ ID NO: 477706 - DNA, 128 bp, Homo sapiens; identical to SEQ ID NO: 338797
  chr5:134278947-134279075
  hypo
  renal vs. ovary,lung

SEQ ID NO: 477707 - DNA, 173 bp, Homo sapiens; identical to SEQ ID NO: 477065
  chr5:134370281-134370454
  hypo
  renal vs. colorectal,lung,pancreas_gallbladder

SEQ ID NO: 477708 - DNA, 38 bp, Homo sapiens; identical to SEQ ID NO: 358244
  chr5:134370508-134370546
  hypo
  renal vs. colorectal,lung,pancreas_gallbladder

SEQ ID NO: 477709 - DNA, 127 bp, Homo sapiens; identical to SEQ ID NO: 338810
  chr5:140905588-140905715
  hypo
  renal vs. cervical,breast,thyroid,head_and_neck,ovary, bladder_and_urothelial,uterine,lung,prostate,melanoma, non_cancer

SEQ ID NO: 477710 - DNA, 79 bp, Homo sapiens; identical to SEQ ID NO: 338829
  chr5:156485569-156485648
  hypo
  renal vs. anorectal

SEQ ID NO: 477711 - DNA, 58 bp, Homo sapiens; identical to SEQ ID NO: 338840
  chr5:159659095-159659153
  hypo
  renal vs. upper_gi

SEQ ID NO: 477712 - DNA, 3 bp, Homo sapiens
  chr5:175971717-175971720
  hypo
  renal vs. multiple_myeloma
cgt

SEQ ID NO: 477713 - DNA, 114 bp, Homo sapiens; identical to SEQ ID NO: 473365
  chr5:176225713-176225827
  hypo
  renal vs. head_and_neck,anorectal

SEQ ID NO: 477714 - DNA, 50 bp, Homo sapiens; identical to SEQ ID NO: 338881
  chr5:176663899-176663949
  hypo
  renal vs. pancreas_gallbladder,bladder_and_urothelial, lung,uterine,lymphoid_neoplasm,head_and_neck,upper_gi,cervical, melanoma,sarcoma,breast,colorectal

SEQ ID NO: 477715 - DNA, 348 bp, Homo sapiens; identical to SEQ ID NO: 338972
  chr6:7882630-7882978
  hypo
  renal vs. sarcoma,colorectal,ovary

SEQ ID NO: 477716 - DNA, 230 bp, Homo sapiens; identical to SEQ ID NO: 338986
  chr6:13318572-13318802
  hypo
  renal vs. pancreas_gallbladder,lung,upper_gi,sarcoma, lymphoid_neoplasm,bladder_and_urothelial,ovary,head_and_neck

SEQ ID NO: 477717 - DNA, 104 bp, Homo sapiens; identical to SEQ ID NO: 339007
  chr6:27428748-27428852
  hypo
  renal vs. head_and_neck,breast,sarcoma,melanoma,thyroid, lung,anorectal,lymphoid_neoplasm,cervical,pancreas_gallbladder

SEQ ID NO: 477718 - DNA, 370 bp, Homo sapiens; identical to SEQ ID NO: 469334
  chr6:37666475-37666845
  hypo
  renal vs. ovary,bladder_and_urothelial

SEQ ID NO: 477719 - DNA, 218 bp, Homo sapiens; identical to SEQ ID NO: 345233
  chr6:37666866-37667084
  hypo
  renal vs. ovary,bladder_and_urothelial

SEQ ID NO: 477720 - DNA, 278 bp, Homo sapiens; identical to SEQ ID NO: 339058
  chr6:43745076-43745354
  hypo
  renal vs. liver_bileduct,lung,bladder_and_urothelial, ovary,melanoma,multiple_myeloma,head_and_neck,uterine,anorectal, colorectal,sarcoma,breast,upper_gi,prostate, pancreas_gallbladder

SEQ ID NO: 477721 - DNA, 174 bp, Homo sapiens; identical to SEQ ID NO: 457060
  chr6:43748290-43748464
  hypo
  renal vs. bladder_and_urothelial,melanoma,liver_bileduct

SEQ ID NO: 477722 - DNA, 126 bp, Homo sapiens; identical to SEQ ID NO: 339060
  chr6:43752469-43752595
  hypo
  renal vs. bladder_and_urothelial,ovary,liver_bileduct, head_and_neck,sarcoma,lung,prostate,uterine,melanoma,colorectal, anorectal,cervical,breast,multiple_myeloma,lymphoid_neoplasm

SEQ ID NO: 477723 - DNA, 198 bp, Homo sapiens; identical to SEQ ID NO: 339069
  chr6:52141070-52141268
  hypo
  renal vs. lung,liver_bileduct,anorectal,colorectal

SEQ ID NO: 477724 - DNA, 53 bp, Homo sapiens; identical to SEQ ID NO: 339094
  chr6:86325389-86325442
  hypo
  renal vs. lung

SEQ ID NO: 477725 - DNA, 120 bp, Homo sapiens; identical to SEQ ID NO: 353814
  chr6:109647757-109647877
  hypo
  renal vs. sarcoma,lymphoid_neoplasm,anorectal,breast, lung,prostate,head_and_neck,bladder_and_urothelial

SEQ ID NO: 477726 - DNA, 135 bp, Homo sapiens; identical to SEQ ID NO: 339121
  chr6:111766152-111766287
  hypo
  renal vs. head_and_neck,breast,lymphoid_neoplasm,thyroid, lung,melanoma,prostate,sarcoma

SEQ ID NO: 477727 - DNA, 455 bp, Homo sapiens; identical to SEQ ID NO: 339145
  chr6:149915200-149915655
  hypo
  renal vs. lymphoid_neoplasm,sarcoma,lung, multiple_myeloma,upper_gi,breast,bladder_and_urothelial,uterine, prostate,cervical,ovary,melanoma,colorectal,head_and_neck, pancreas_gallbladder,non_cancer

SEQ ID NO: 477728 - DNA, 210 bp, Homo sapiens; identical to SEQ ID NO: 339161
  chr6:157351875-157352085
  hypo
  renal vs. liver_bileduct,colorectal,breast,lung, myeloid_neoplasm,uterine,head_and_neck,anorectal, pancreas_gallbladder,prostate,melanoma

SEQ ID NO: 477729 - DNA, 172 bp, Homo sapiens; identical to SEQ ID NO: 339171
  chr6:158651816-158651988
  hypo
  renal vs. pancreas_gallbladder,bladder_and_urothelial, head_and_neck

SEQ ID NO: 477730 - DNA, 200 bp, Homo sapiens; identical to SEQ ID NO: 339177
  chr6:159206098-159206298
  hypo
  renal vs. lymphoid_neoplasm

SEQ ID NO: 477731 - DNA, 447 bp, Homo sapiens; identical to SEQ ID NO: 339182
  chr6:160679377-160679824
  hypo
  renal vs. liver_bileduct,head_and_neck,colorectal, anorectal,pancreas_gallbladder,uterine,lymphoid_neoplasm, upper_gi

SEQ ID NO: 477732 - DNA, 106 bp, Homo sapiens; identical to SEQ ID NO: 460454
  chr6:167834910-167835016
  hypo
  renal vs. lymphoid_neoplasm

SEQ ID NO: 477733 - DNA, 324 bp, Homo sapiens
  chr7:212456-212780
  hypo
  renal vs. head_and_neck,melanoma,anorectal
cgtctcaaaaaaaaaagttttctttagtaaaggactttgctctctgcgctcatcacggctcggtgagttcctagtacaacgtcgtgaattagagagcacagtgtttctcctccgaggtgctagatgtgcggtgagagggtgtaggtgaggggccggcggtgaggtgggggccagcctggggtgctgcacagcgtgtggggggcgggatcaccaggggaagttttagggtctccgtttctaatagtcgctgaaaagcacgtagccggcacatcaacccaagcgctcctgggtgcttttgctttagggttacgttaagatatttac

SEQ ID NO: 477734 - DNA, 137 bp, Homo sapiens; identical to SEQ ID NO: 475092
  chr7:808392-808529
  hypo
  renal vs. liver_bileduct

SEQ ID NO: 477735 - DNA, 242 bp, Homo sapiens; identical to SEQ ID NO: 475093
  chr7:808577-808819
  hypo
  renal vs. liver_bileduct

SEQ ID NO: 477736 - DNA, 382 bp, Homo sapiens; identical to SEQ ID NO: 364209
  chr7:808848-809230
  hypo
  renal vs. liver_bileduct

SEQ ID NO: 477737 - DNA, 420 bp, Homo sapiens; identical to SEQ ID NO: 339277
  chr7:1202650-1203070
  hypo
  renal vs. colorectal,melanoma,head_and_neck, lymphoid_neoplasm,liver_bileduct,upper_gi,breast, multiple_myeloma,cervical,uterine,sarcoma, bladder_and_urothelial,prostate,non_cancer,ovary

SEQ ID NO: 477738 - DNA, 178 bp, Homo sapiens; identical to SEQ ID NO: 364226
  chr7:1333680-1333858
  hypo
  renal vs. thyroid,cervical

SEQ ID NO: 477739 - DNA, 253 bp, Homo sapiens; identical to SEQ ID NO: 348189
  chr7:2071776-2072029
  hypo
  renal vs. lung,pancreas_gallbladder,liver_bileduct, melanoma,lymphoid_neoplasm,colorectal,head_and_neck,prostate, upper_gi,cervical,anorectal,bladder_and_urothelial,non_cancer, sarcoma,myeloid_neoplasm

SEQ ID NO: 477740 - DNA, 327 bp, Homo sapiens; identical to SEQ ID NO: 454005
  chr7:2208344-2208671
  hypo
  renal vs. melanoma,cervical,non_cancer,liver_bileduct, colorectal,pancreas_gallbladder,thyroid,myeloid_neoplasm, sarcoma,prostate,upper_gi,breast,uterine,multiple_myeloma, lymphoid_neoplasm

SEQ ID NO: 477741 - DNA, 91 bp, Homo sapiens; identical to SEQ ID NO: 345892
  chr7:2208844-2208935
  hypo
  renal vs. melanoma,cervical,non_cancer,liver_bileduct, colorectal,pancreas_gallbladder,thyroid,myeloid_neoplasm, sarcoma,prostate,upper_gi,breast,uterine,multiple_myeloma, lymphoid_neoplasm

SEQ ID NO: 477742 - DNA, 30 bp, Homo sapiens; identical to SEQ ID NO: 473411
  chr7:2264982-2265012
  hypo
  renal vs. melanoma

SEQ ID NO: 477743 - DNA, 290 bp, Homo sapiens; identical to SEQ ID NO: 473412
  chr7:2265241-2265531
  hypo
  renal vs. melanoma

SEQ ID NO: 477744 - DNA, 327 bp, Homo sapiens; identical to SEQ ID NO: 339345
  chr7:2679783-2680110
  hypo
  renal vs. liver_bileduct,upper_gi,uterine, bladder_and_urothelial,pancreas_gallbladder,lung,breast, prostate,cervical,melanoma,sarcoma,head_and_neck,colorectal

SEQ ID NO: 477745 - DNA, 237 bp, Homo sapiens; identical to SEQ ID NO: 339373
  chr7:5230941-5231178
  hypo
  renal vs. lymphoid_neoplasm,prostate,myeloid_neoplasm, head_and_neck,colorectal,lung,non_cancer,cervical, multiple_myeloma

SEQ ID NO: 477746 - DNA, 62 bp, Homo sapiens; identical to SEQ ID NO: 463000
  chr7:6570393-6570455
  hypo
  renal vs. thyroid,ovary,non_cancer,uterine,prostate

SEQ ID NO: 477747 - DNA, 60 bp, Homo sapiens; identical to SEQ ID NO: 454474
  chr7:19156644-19156704
  hypo
  renal vs. sarcoma,melanoma,myeloid_neoplasm,uterine, prostate,ovary

SEQ ID NO: 477748 - DNA, 761 bp, Homo sapiens; identical to SEQ ID NO: 454479
  chr7:23510081-23510842
  hypo
  renal vs. colorectal,uterine

SEQ ID NO: 477749 - DNA, 34 bp, Homo sapiens; identical to SEQ ID NO: 455390
  chr7:27686735-27686769
  hypo
  renal vs. lymphoid_neoplasm,sarcoma,colorectal, multiple_myeloma

SEQ ID NO: 477750 - DNA, 45 bp, Homo sapiens; identical to SEQ ID NO: 353958
  chr7:27686815-27686860
  hypo
  renal vs. lymphoid_neoplasm,sarcoma,colorectal, multiple_myeloma

SEQ ID NO: 477751 - DNA, 190 bp, Homo sapiens
  chr7:27907637-27907827
  hypo
  renal vs. prostate,breast,melanoma,myeloid_neoplasm, thyroid,upper_gi,non_cancer,cervical,colorectal,uterine, lymphoid_neoplasm,pancreas_gallbladder,head_and_neck, bladder_and_urothelial,lung
cgcttggtgactcaggcaagacattcaattccatttgccattttcttctcttgctacagagcccacttcagaggattcaatgagtgaatacgacaacggtgcttggatcagtgcctgccatactgtcagcactagtcgttactattttcactggttgaacagacacgtgagttcacacatgacaccatct

SEQ ID NO: 477752 - DNA, 70 bp, Homo sapiens; identical to SEQ ID NO: 348221
  chr7:27908068-27908138
  hypo
  renal vs. prostate,breast,melanoma,myeloid_neoplasm, thyroid,upper_gi,non_cancer,cervical,colorectal,uterine, lymphoid_neoplasm,pancreas_gallbladder,head_and_neck, bladder_and_urothelial,lung

SEQ ID NO: 477753 - DNA, 120 bp, Homo sapiens; identical to SEQ ID NO: 339440
  chr7:27914823-27914943
  hypo
  renal vs. bladder_and_urothelial

SEQ ID NO: 477754 - DNA, 89 bp, Homo sapiens; identical to SEQ ID NO: 339457
  chr7:32609681-32609770
  hypo
  renal vs. head_and_neck,lymphoid_neoplasm,lung,breast, melanoma

SEQ ID NO: 477755 - DNA, 254 bp, Homo sapiens; identical to SEQ ID NO: 339463
  chr7:36124398-36124652
  hypo
  renal vs. anorectal,head_and_neck,colorectal,prostate, lymphoid_neoplasm,thyroid,cervical,non_cancer

SEQ ID NO: 477756 - DNA, 7 bp, Homo sapiens
  chr7:37487365-37487372
  hypo
  renal vs. lymphoid_neoplasm
cgctcgc

SEQ ID NO: 477757 - DNA, 51 bp, Homo sapiens; identical to SEQ ID NO: 348228
  chr7:44740672-44740723
  hypo
  renal vs. liver_bileduct,pancreas_gallbladder

SEQ ID NO: 477758 - DNA, 438 bp, Homo sapiens
  chr7:47605259-47605697
  hypo
  renal vs. liver_bileduct,upper_gi,bladder_and_urothelial, ovary,lymphoid_neoplasm,head_and_neck,pancreas_gallbladder
cgcttggccagttttttatttcttaaggtaataagccagtaggtgggggacaaagttaaatataaacaaatgctgaaaatacgcacaaatttacactagttaacaccaacctcgctttccaatttcgcactctgctggatttcttaatcttaggcaaaaattcacattgggggttcagggagctaaaaggagttctcctaagtatgagaactgtaaatgcagcttattcctcacacgggcgctgggaggctttggaagagcaaccagccacagtctgatggcatgatatgcgtggattactgcaaagccacatggaactttaaagacatctcaattaacagcttcactggggtttcagattagtatacatattggaaaaaagattaatccagatgagtggttctaaaccctgccgagccgcaacccaaagtgtctgac

SEQ ID NO: 477759 - DNA, 102 bp, Homo sapiens; identical to SEQ ID NO: 345274
  chr7:50344738-50344840
  hypo
  renal vs. anorectal,non_cancer,myeloid_neoplasm, lymphoid_neoplasm,multiple_myeloma,uterine,thyroid,ovary

SEQ ID NO: 477760 - DNA, 336 bp, Homo sapiens; identical to SEQ ID NO: 339558
  chr7:98598608-98598944
  hypo
  renal vs. liver_bileduct

SEQ ID NO: 477761 - DNA, 170 bp, Homo sapiens; identical to SEQ ID NO: 339559
  chr7:98599246-98599416
  hypo
  renal vs. anorectal

SEQ ID NO: 477762 - DNA, 236 bp, Homo sapiens; identical to SEQ ID NO: 339571
  chr7:100064586-100064822
  hypo
  renal vs. cervical,liver_bileduct,colorectal, lymphoid_neoplasm

SEQ ID NO: 477763 - DNA, 201 bp, Homo sapiens; identical to SEQ ID NO: 339579
  chr7:100849441-100849642
  hypo
  renal vs. upper_gi

SEQ ID NO: 477764 - DNA, 132 bp, Homo sapiens; identical to SEQ ID NO: 339582
  chr7:101536683-101536815
  hypo
  renal vs. liver_bileduct,upper_gi,pancreas_gallbladder, lung,colorectal,melanoma,bladder_and_urothelial,breast, anorectal,prostate,head_and_neck,non_cancer

SEQ ID NO: 477765 - DNA, 332 bp, Homo sapiens; identical to SEQ ID NO: 354030
  chr7:101566736-101567068
  hypo
  renal vs. melanoma

SEQ ID NO: 477766 - DNA, 429 bp, Homo sapiens; identical to SEQ ID NO: 339587
  chr7:101649223-101649652
  hypo
  renal vs. liver_bileduct,uterine,breast,sarcoma,lung, head_and_neck,anorectal,colorectal,prostate,upper_gi, bladder_and_urothelial,ovary,cervical,non_cancer,melanoma

SEQ ID NO: 477767 - DNA, 176 bp, Homo sapiens; identical to SEQ ID NO: 371652
  chr7:103086734-103086910
  hypo
  renal vs. ovary

SEQ ID NO: 477768 - DNA, 67 bp, Homo sapiens; identical to SEQ ID NO: 459157
  chr7:104917801-104917868
  hypo
  renal vs. lymphoid_neoplasm,lung

SEQ ID NO: 477769 - DNA, 3 bp, Homo sapiens
  chr7:128097690-128097693
  hypo
  renal vs. sarcoma,multiple_myeloma
tgc

SEQ ID NO: 477770 - DNA, 362 bp, Homo sapiens; identical to SEQ ID NO: 345285
  chr7:139930346-139930708
  hypo
  renal vs. cervical,colorectal

SEQ ID NO: 477771 - DNA, 32 bp, Homo sapiens; identical to SEQ ID NO: 460507
  chr7:140156493-140156525
  hypo
  renal vs. lymphoid_neoplasm,prostate,breast, myeloid_neoplasm,cervical,melanoma,pancreas_gallbladder, non_cancer,multiple_myeloma,upper_gi,anorectal

SEQ ID NO: 477772 - DNA, 88 bp, Homo sapiens; identical to SEQ ID NO: 339650
  chr7:140156968-140157056
  hypo
  renal vs. breast,cervical,prostate,melanoma

SEQ ID NO: 477773 - DNA, 135 bp, Homo sapiens; identical to SEQ ID NO: 364532
  chr7:149418013-149418148
  hypo
  renal vs. uterine,lung,breast,prostate,head_and_neck

SEQ ID NO: 477774 - DNA, 137 bp, Homo sapiens; identical to SEQ ID NO: 339688
  chr7:151506379-151506516
  hypo
  renal vs. cervical,head_and_neck,upper_gi

SEQ ID NO: 477775 - DNA, 195 bp, Homo sapiens; identical to SEQ ID NO: 339691
  chr7:151791364-151791559
  hypo
  renal vs. cervical,pancreas_gallbladder,melanoma, head_and_neck,upper_gi,liver_bileduct

SEQ ID NO: 477776 - DNA, 139 bp, Homo sapiens; identical to SEQ ID NO: 339705
  chr7:155502704-155502843
  hypo
  renal vs. melanoma,bladder_and_urothelial,head_and_neck, uterine,ovary,cervical,lung,breast,upper_gi,liver_bileduct, pancreas_gallbladder,colorectal

SEQ ID NO: 477777 - DNA, 1 bp, Homo sapiens
  chr7:155581242-155581243
  hypo
  renal vs. lymphoid_neoplasm
c

SEQ ID NO: 477778 - DNA, 39 bp, Homo sapiens; identical to SEQ ID NO: 345928
  chr7:155581980-155582019
  hypo
  renal vs. lymphoid_neoplasm

SEQ ID NO: 477779 - DNA, 53 bp, Homo sapiens; identical to SEQ ID NO: 339725
  chr7:157128236-157128289
  hypo
  renal vs. melanoma,prostate,colorectal,upper_gi, non_cancer,pancreas_gallbladder,lymphoid_neoplasm,thyroid, cervical,bladder_and_urothelial,liver_bileduct

SEQ ID NO: 477780 - DNA, 260 bp, Homo sapiens; identical to SEQ ID NO: 354147
  chr8:591683-591943
  hypo
  renal vs. thyroid,anorectal,melanoma,colorectal, lymphoid_neoplasm

SEQ ID NO: 477781 - DNA, 439 bp, Homo sapiens; identical to SEQ ID NO: 463947
  chr8:1132651-1133090
  hypo
  renal vs. cervical,colorectal,lymphoid_neoplasm

SEQ ID NO: 477782 - DNA, 219 bp, Homo sapiens; identical to SEQ ID NO: 477135
  chr8:9761155-9761374
  hypo
  renal vs. thyroid,ovary

SEQ ID NO: 477783 - DNA, 261 bp, Homo sapiens; identical to SEQ ID NO: 477136
  chr8:9761155-9761416
  hypo
  renal vs. thyroid

SEQ ID NO: 477784 - DNA, 128 bp, Homo sapiens; identical to SEQ ID NO: 339872
  chr8:28207473-28207601
  hypo
  renal vs. lung,liver_bileduct,upper_gi

SEQ ID NO: 477785 - DNA, 89 bp, Homo sapiens; identical to SEQ ID NO: 339873
  chr8:28207908-28207997
  hypo
  renal vs. ovary,upper_gi

SEQ ID NO: 477786 - DNA, 92 bp, Homo sapiens; identical to SEQ ID NO: 339874
  chr8:28237888-28237980
  hypo
  renal vs. bladder_and_urothelial

SEQ ID NO: 477787 - DNA, 402 bp, Homo sapiens; identical to SEQ ID NO: 339882
  chr8:37702286-37702688
  hypo
  renal vs. upper_gi,bladder_and_urothelial

SEQ ID NO: 477788 - DNA, 85 bp, Homo sapiens; identical to SEQ ID NO: 339884
  chr8:38697075-38697160
  hypo
  renal vs. cervical,colorectal,breast,head_and_neck

SEQ ID NO: 477789 - DNA, 212 bp, Homo sapiens; identical to SEQ ID NO: 345302
  chr8:61193765-61193977
  hypo
  renal vs. ovary

SEQ ID NO: 477790 - DNA, 293 bp, Homo sapiens; identical to SEQ ID NO: 453456
  chr8:61193765-61194058
  hypo
  renal vs. upper_gi

SEQ ID NO: 477791 - DNA, 144 bp, Homo sapiens; identical to SEQ ID NO: 201426
  chr8:61822883-61823027
  hypo
  renal vs. ovary

SEQ ID NO: 477792 - DNA, 142 bp, Homo sapiens; identical to SEQ ID NO: 457181
  chr8:81213177-81213319
  hypo
  renal vs. pancreas_gallbladder

SEQ ID NO: 477793 - DNA, 327 bp, Homo sapiens; identical to SEQ ID NO: 354209
  chr8:81213356-81213683
  hypo
  renal vs. pancreas_gallbladder

SEQ ID NO: 477794 - DNA, 78 bp, Homo sapiens; identical to SEQ ID NO: 339978
  chr8:95848311-95848389
  hypo
  renal vs. liver_bileduct,bladder_and_urothelial

SEQ ID NO: 477795 - DNA, 420 bp, Homo sapiens; identical to SEQ ID NO: 463069
  chr8:99956867-99957287
  hypo
  renal vs. upper_gi

SEQ ID NO: 477796 - DNA, 623 bp, Homo sapiens; identical to SEQ ID NO: 477143
  chr8:107669381-107670004
  hypo
  renal vs. liver_bileduct,uterine,cervical,sarcoma, colorectal,head_and_neck,upper_gi,ovary,anorectal, pancreas_gallbladder,breast,lung,thyroid,melanoma,prostate, non_cancer,multiple_myeloma,myeloid_neoplasm,
  CONT. FROM ABOVE: bladder_and_urothelial

SEQ ID NO: 477797 - DNA, 271 bp, Homo sapiens; identical to SEQ ID NO: 477144
  chr8:107669733-107670004
  hypo
  renal vs. sarcoma,liver_bileduct,cervical,head_and_neck, ovary,anorectal,uterine,pancreas_gallbladder,colorectal, melanoma,upper_gi,bladder_and_urothelial,lung,thyroid,breast, multiple_myeloma,prostate,myeloid_neoplasm,non_cancer

SEQ ID NO: 477798 - DNA, 123 bp, Homo sapiens; identical to SEQ ID NO: 364791
  chr8:120846246-120846369
  hypo
  renal vs. bladder_and_urothelial,lymphoid_neoplasm,lung, melanoma,sarcoma

SEQ ID NO: 477799 - DNA, 42 bp, Homo sapiens
  chr8:125573965-125574007
  hypo
  renal vs. cervical
cgaccctttgccctctctgcttgtgagcagcacatatggttt

SEQ ID NO: 477800 - DNA, 165 bp, Homo sapiens; identical to SEQ ID NO: 378667
  chr8:125574036-125574201
  hypo
  renal vs. cervical

SEQ ID NO: 477801 - DNA, 132 bp, Homo sapiens; identical to SEQ ID NO: 340020
  chr8:126042734-126042866
  hypo
  renal vs. lymphoid_neoplasm,colorectal,melanoma,upper_gi

SEQ ID NO: 477802 - DNA, 44 bp, Homo sapiens; identical to SEQ ID NO: 454049
  chr8:126044399-126044443
  hypo
  renal vs. melanoma,prostate,sarcoma,colorectal, lymphoid_neoplasm

SEQ ID NO: 477803 - DNA, 30 bp, Homo sapiens; identical to SEQ ID NO: 454050
  chr8:126044563-126044593
  hypo
  renal vs. melanoma,prostate,sarcoma,colorectal, lymphoid_neoplasm

SEQ ID NO: 477804 - DNA, 354 bp, Homo sapiens; identical to SEQ ID NO: 340025
  chr8:128867892-128868246
  hypo
  renal vs. bladder_and_urothelial,colorectal,breast, melanoma,uterine,lung

SEQ ID NO: 477805 - DNA, 631 bp, Homo sapiens; identical to SEQ ID NO: 455454
  chr8:128871653-128872284
  hypo
  renal vs. uterine,ovary,sarcoma,myeloid_neoplasm,thyroid, colorectal

SEQ ID NO: 477806 - DNA, 191 bp, Homo sapiens; identical to SEQ ID NO: 345946
  chr8:128872459-128872650
  hypo
  renal vs. uterine,ovary,sarcoma,myeloid_neoplasm,thyroid, colorectal

SEQ ID NO: 477807 - DNA, 62 bp, Homo sapiens; identical to SEQ ID NO: 457194
  chr8:128888848-128888910
  hypo
  renal vs. melanoma,sarcoma,lymphoid_neoplasm,colorectal, prostate,non_cancer,multiple_myeloma

SEQ ID NO: 477808 - DNA, 43 bp, Homo sapiens; identical to SEQ ID NO: 345948
  chr8:128889422-128889465
  hypo
  renal vs. melanoma,sarcoma,lymphoid_neoplasm,colorectal, prostate,non_cancer,multiple_myeloma

SEQ ID NO: 477809 - DNA, 440 bp, Homo sapiens; identical to SEQ ID NO: 340028
  chr8:128893135-128893575
  hypo
  renal vs. cervical,colorectal,sarcoma,lymphoid_neoplasm, pancreas_gallbladder,liver_bileduct,upper_gi,prostate,lung

SEQ ID NO: 477810 - DNA, 101 bp, Homo sapiens; identical to SEQ ID NO: 340037
  chr8:134254220-134254321
  hypo
  renal vs. cervical,sarcoma,head_and_neck

SEQ ID NO: 477811 - DNA, 322 bp, Homo sapiens; identical to SEQ ID NO: 340047
  chr8:140799730-140800052
  hypo
  renal vs. liver_bileduct

SEQ ID NO: 477812 - DNA, 392 bp, Homo sapiens; identical to SEQ ID NO: 340057
  chr8:141147354-141147746
  hypo
  renal vs. melanoma,sarcoma,head_and_neck,breast,uterine, cervical,lung,prostate,thyroid,lymphoid_neoplasm, pancreas_gallbladder,non_cancer,bladder_and_urothelial, colorectal,upper_gi

SEQ ID NO: 477813 - DNA, 297 bp, Homo sapiens; identical to SEQ ID NO: 457198
  chr8:141599879-141600176
  hypo
  renal vs. anorectal

SEQ ID NO: 477814 - DNA, 50 bp, Homo sapiens; identical to SEQ ID NO: 345953
  chr8:141600284-141600334
  hypo
  renal vs. anorectal

SEQ ID NO: 477815 - DNA, 89 bp, Homo sapiens; identical to SEQ ID NO: 460536
  chr8:142243860-142243949
  hypo
  renal vs. melanoma

SEQ ID NO: 477816 - DNA, 66 bp, Homo sapiens; identical to SEQ ID NO: 354264
  chr8:142244214-142244280
  hypo
  renal vs. melanoma

SEQ ID NO: 477817 - DNA, 63 bp, Homo sapiens; identical to SEQ ID NO: 340154
  chr8:146105109-146105172
  hypo
  renal vs. sarcoma,melanoma,cervical,anorectal, head_and_neck,breast,prostate,bladder_and_urothelial,uterine

SEQ ID NO: 477818 - DNA, 65 bp, Homo sapiens; identical to SEQ ID NO: 340157
  chr9:173878-173943
  hypo
  renal vs. lung,liver_bileduct,pancreas_gallbladder, upper_gi,head_and_neck,ovary

SEQ ID NO: 477819 - DNA, 231 bp, Homo sapiens
  chr9:7028696-7028927
  hypo
  renal vs. head_and_neck,uterine,prostate,ovary, lymphoid_neoplasm,breast,colorectal,cervical,thyroid,lung, pancreas_gallbladder,non_cancer,bladder_and_urothelial,melanoma, upper_gi
cgcaccccagagtactctagcccgtggtggcaaggcttgctggaactgggatgtgtgatctccctctgacgtggactggttaaatattccctctgtgggcaggcgccaggtcagctcagccaggtttgctttctcttgtaactgggcagcacggaattcagtgcattctcttacaatttctgtgctctcctgtgccatgtgaccgttgccaggggataagggaggggcggc

SEQ ID NO: 477820 - DNA, 44 bp, Homo sapiens
  chr9:19374763-19374807
  hypo
  renal vs. sarcoma
cgcagtgcacacctgtagttcccaggcggtcaaggctgcagtga

SEQ ID NO: 477821 - DNA, 238 bp, Homo sapiens; identical to SEQ ID NO: 463087
  chr9:37035890-37036128
  hypo
  renal vs. myeloid_neoplasm

SEQ ID NO: 477822 - DNA, 3 bp, Homo sapiens
  chr9:66494093-66494096
  hypo
  renal vs. breast
cgc

SEQ ID NO: 477823 - DNA, 23 bp, Homo sapiens
  chr9:90386494-90386517
  hypo
  renal vs. anorectal
cgggacgggggccaccccggtgc

SEQ ID NO: 477824 - DNA, 280 bp, Homo sapiens; identical to SEQ ID NO: 340243
  chr9:96348822-96349102
  hypo
  renal vs. liver_bileduct

SEQ ID NO: 477825 - DNA, 191 bp, Homo sapiens
  chr9:116065600-116065791
  hypo
  renal vs. prostate,non_cancer,melanoma,sarcoma
cgctcatccttgcaggcctctgttctgggtccgattgatctcctgccatcccctcggattccactgtcctctgtgcgctgacctgcctcgactcctggcttctgccgagatggatccttccctatgctgagtccctgtaaccaaaatacagatagctcttgcaaaatactgacaaaagcggccactaatac

SEQ ID NO: 477826 - DNA, 302 bp, Homo sapiens; identical to SEQ ID NO: 354359
  chr9:116065827-116066129
  hypo
  renal vs. prostate,non_cancer,melanoma,sarcoma

SEQ ID NO: 477827 - DNA, 43 bp, Homo sapiens; identical to SEQ ID NO: 473504
  chr9:116800647-116800690
  hypo
  renal vs. liver_bileduct,melanoma,pancreas_gallbladder, lymphoid_neoplasm,upper_gi,cervical,bladder_and_urothelial, breast,colorectal,prostate

SEQ ID NO: 477828 - DNA, 563 bp, Homo sapiens; identical to SEQ ID NO: 354365
  chr9:116800730-116801293
  hypo
  renal vs. liver_bileduct,melanoma,pancreas_gallbladder, lymphoid_neoplasm,upper_gi,cervical,bladder_and_urothelial, breast,colorectal,prostate

SEQ ID NO: 477829 - DNA, 3 bp, Homo sapiens
  chr9:124751388-124751391
  hypo
  renal vs. prostate,anorectal,melanoma,breast
cga

SEQ ID NO: 477830 - DNA, 90 bp, Homo sapiens; identical to SEQ ID NO: 365036
  chr9:124751515-124751605
  hypo
  renal vs. prostate,anorectal,melanoma,breast

SEQ ID NO: 477831 - DNA, 280 bp, Homo sapiens; identical to SEQ ID NO: 333801
  chr9:132145475-132145755
  hypo
  renal vs. liver_bileduct

SEQ ID NO: 477832 - DNA, 344 bp, Homo sapiens; identical to SEQ ID NO: 473513
  chr9:132881052-132881396
  hypo
  renal vs. myeloid_neoplasm,multiple_myeloma,prostate, upper_gi,thyroid,non_cancer,pancreas_gallbladder

SEQ ID NO: 477833 - DNA, 35 bp, Homo sapiens; identical to SEQ ID NO: 348379
  chr9:132881495-132881530
  hypo
  renal vs. myeloid_neoplasm,multiple_myeloma,prostate, upper_gi,thyroid,non_cancer,pancreas_gallbladder

SEQ ID NO: 477834 - DNA, 144 bp, Homo sapiens; identical to SEQ ID NO: 340364
  chr9:133592887-133593031
  hypo
  renal vs. liver_bileduct

SEQ ID NO: 477835 - DNA, 637 bp, Homo sapiens; identical to SEQ ID NO: 475929
  chr9:140196486-140197123
  hypo
  renal vs. ovary,cervical,uterine

SEQ ID NO: 477836 - DNA, 155 bp, Homo sapiens; identical to SEQ ID NO: 347067
  chr9:140197263-140197418
  hypo
  renal vs. ovary,cervical,uterine

SEQ ID NO: 477837 - DNA, 232 bp, Homo sapiens; identical to SEQ ID NO: 340489
  chr9:140645189-140645421
  hypo
  renal vs. colorectal,upper_gi,lung,pancreas_gallbladder, head_and_neck,prostate,breast,non_cancer,lymphoid_neoplasm, sarcoma,liver_bileduct,cervical

SEQ ID NO: 477838 - DNA, 78 bp, Homo sapiens
  chrX:41331620-41331698
  hypo
  renal vs. melanoma
cggtggctccaaagtgggtggccacacgcacaccctcgtgcaatgtgaagctcacctgatgactcaccatggccagca

SEQ ID NO: 477839 - DNA, 286 bp, Homo sapiens; identical to SEQ ID NO: 368934
  chrX:41331751-41332037
  hypo
  renal vs. melanoma

SEQ ID NO: 477840 - DNA, 624 bp, Homo sapiens; identical to SEQ ID NO: 454529
  chrY:16636060-16636684
  hypo
  renal vs. ovary,uterine,breast,cervical

SEQ ID NO: 477841 - DNA, 949 bp, Homo sapiens; identical to SEQ ID NO: 454530
  chrY:16636193-16637142
  hypo
  renal vs. ovary,uterine,breast,cervical

SEQ ID NO: 477842 - DNA, 208 bp, Homo sapiens; identical to SEQ ID NO: 356619
  chrY:21205113-21205321
  hypo
  renal vs. ovary,uterine,breast,cervical

SEQ ID NO: 477843 - DNA, 1 bp, Homo sapiens
  chrY:22918423-22918424
  hypo
  renal vs. ovary,uterine,breast,cervical
c

SEQ ID NO: 477844 - DNA, 122 bp, Homo sapiens; identical to SEQ ID NO: 346299
  chrY:22918582-22918704
  hypo
  renal vs. ovary,uterine,breast,cervical

SEQ ID NO: 477845 - DNA, 135 bp, Homo sapiens; identical to SEQ ID NO: 330646
  chr1:999594-999729
  hyper
  sarcoma vs. melanoma,upper_gi,lymphoid_neoplasm, head_and_neck

SEQ ID NO: 477846 - DNA, 633 bp, Homo sapiens; identical to SEQ ID NO: 368961
  chr1:1981183-1981816
  hyper
  sarcoma vs. lung

SEQ ID NO: 477847 - DNA, 331 bp, Homo sapiens
  chr1:1981818-1982149
  hyper
  sarcoma vs. lung
attggccgctggctccacctcggtccgccatgttcggacaccgccccccgcccccgccggacggtcccgccccgcgcgccccccgctcccgccccgcgcgccgccggagttccgcggagttgaccgggtcggcgccgtcggtcctgagcgctgccttccgcgttccgccgcggccccacctggagcccccgccccgcgccatggccggagctcccggggcgcagcgctgacggcggcggggggagcgcgccatgcccagcaggaccggccccaagatggaagggagcggcggccgcgtccgcctcaaggcgcattacggggggtgagcggc

SEQ ID NO: 477848 - DNA, 162 bp, Homo sapiens
  chr1:1981654-1981816
  hyper
  sarcoma vs. liver_bileduct
cgcgccccgcccaacaggtagccccgcccgacaggtagccccgcccgcgcctcgccattgggccgcggccgggtgtcccccgaggattggcccaggtggcggccccgcctcgccctcattggccgcaggtgccaccgcccgccccgggaccgcccgccccgc

SEQ ID NO: 477849 - DNA, 494 bp, Homo sapiens
  chr1:1981818-1982312
  hyper
  sarcoma vs. liver_bileduct
attggccgctggctccacctcggtccgccatgttcggacaccgccccccgcccccgccggacggtcccgccccgcgcgccccccgctcccgccccgcgcgccgccggagttccgcggagttgaccgggtcggcgccgtcggtcctgagcgctgccttccgcgttccgccgcggccccacctggagcccccgccccgcgccatggccggagctcccggggcgcagcgctgacggcggcggggggagcgcgccatgcccagcaggaccggccccaagatggaagggagcggcggccgcgtccgcctcaaggcgcattacggggggtgagcggcggagagggcggggagcggcgcgggtgaggcagggagggcggggagggctcagccgtcggggctcctgcgcgagagggagagagggaaggggcggcgaggtcgctgcgggcccggggctgtcgcgggaggtcctcggtccccgcccgtgagcgtcacccgcgga

SEQ ID NO: 477850 - DNA, 198 bp, Homo sapiens; identical to SEQ ID NO: 368963
  chr1:1982427-1982625
  hyper
  sarcoma vs. liver_bileduct

SEQ ID NO: 477851 - DNA, 36 bp, Homo sapiens
  chr1:6086224-6086260
  hyper
  sarcoma vs. cervical,melanoma,head_and_neck,breast, liver_bileduct,lymphoid_neoplasm,colorectal,myeloid_neoplasm, bladder_and_urothelial
cgctgctcatccaggaaggtcggagatgtcgggccc

SEQ ID NO: 477852 - DNA, 88 bp, Homo sapiens; identical to SEQ ID NO: 349152
  chr1:6086291-6086379
  hyper
  sarcoma vs. cervical,melanoma,head_and_neck,breast, liver_bileduct,lymphoid_neoplasm,colorectal,myeloid_neoplasm, bladder_and_urothelial

SEQ ID NO: 477853 - DNA, 5 bp, Homo sapiens
  chr1:6309178-6309183
  hyper
  sarcoma vs. anorectal,multiple_myeloma
cggga

SEQ ID NO: 477854 - DNA, 2 bp, Homo sapiens
  chr1:6310089-6310091
  hyper
  sarcoma vs. anorectal,multiple_myeloma
cc

SEQ ID NO: 477855 - DNA, 227 bp, Homo sapiens; identical to SEQ ID NO: 330672
  chr1:6474528-6474755
  hyper
  sarcoma vs. head_and_neck,ovary

SEQ ID NO: 477856 - DNA, 109 bp, Homo sapiens; identical to SEQ ID NO: 460576
  chr1:6545271-6545380
  hyper
  sarcoma vs. ovary,cervical

SEQ ID NO: 477857 - DNA, 247 bp, Homo sapiens; identical to SEQ ID NO: 460577
  chr1:6545639-6545886
  hyper
  sarcoma vs. ovary,cervical

SEQ ID NO: 477858 - DNA, 222 bp, Homo sapiens; identical to SEQ ID NO: 349161
  chr1:6545931-6546153
  hyper
  sarcoma vs. ovary,cervical

SEQ ID NO: 477859 - DNA, 344 bp, Homo sapiens; identical to SEQ ID NO: 330677
  chr1:6546495-6546839
  hyper
  sarcoma vs. melanoma,renal

SEQ ID NO: 477860 - DNA, 53 bp, Homo sapiens; identical to SEQ ID NO: 462206
  chr1:11538821-11538874
  hyper
  sarcoma vs. melanoma,cervical,ovary,prostate,anorectal, breast

SEQ ID NO: 477861 - DNA, 274 bp, Homo sapiens; identical to SEQ ID NO: 330703
  chr1:15735867-15736141
  hyper
  sarcoma vs. lung,lymphoid_neoplasm, bladder_and_urothelial,breast,ovary

SEQ ID NO: 477862 - DNA, 23 bp, Homo sapiens
  chr1:18956304-18956327
  hyper
  sarcoma vs. multiple_myeloma,non_cancer,myeloid_neoplasm
tcgcccccaggactcggtgtccc

SEQ ID NO: 477863 - DNA, 307 bp, Homo sapiens; identical to SEQ ID NO: 369028
  chr1:19283560-19283867
  hyper
  sarcoma vs. ovary,bladder_and_urothelial

SEQ ID NO: 477864 - DNA, 259 bp, Homo sapiens; identical to SEQ ID NO: 465897
  chr1:20810336-20810595
  hyper
  sarcoma vs. liver_bileduct

SEQ ID NO: 477865 - DNA, 260 bp, Homo sapiens; identical to SEQ ID NO: 465898
  chr1:20810930-20811190
  hyper
  sarcoma vs. liver_bileduct

SEQ ID NO: 477866 - DNA, 68 bp, Homo sapiens; identical to SEQ ID NO: 465899
  chr1:20811219-20811287
  hyper
  sarcoma vs. liver_bileduct

SEQ ID NO: 477867 - DNA, 5 bp, Homo sapiens
  chr1:24648226-24648231
  hyper
  sarcoma vs. cervical,breast,anorectal
cgggt

SEQ ID NO: 477868 - DNA, 491 bp, Homo sapiens; identical to SEQ ID NO: 475229
  chr1:24648342-24648833
  hyper
  sarcoma vs. cervical,breast,anorectal

SEQ ID NO: 477869 - DNA, 40 bp, Homo sapiens; identical to SEQ ID NO: 330727
  chr1:24739857-24739897
  hyper
  sarcoma vs. liver_bileduct

SEQ ID NO: 477870 - DNA, 234 bp, Homo sapiens; identical to SEQ ID NO: 330728
  chr1:24742017-24742251
  hyper
  sarcoma vs. liver_bileduct,lung,head_and_neck, lymphoid_neoplasm,colorectal

SEQ ID NO: 477871 - DNA, 82 bp, Homo sapiens
  chr1:31157913-31157995
  hyper
  sarcoma vs. melanoma
cggtgggcgcctcccgggcccagcagcctcttggctgggaaagagacagacgggggcccccttccccgggaactgactttcc

SEQ ID NO: 477872 - DNA, 226 bp, Homo sapiens; identical to SEQ ID NO: 349201
  chr1:31158226-31158452
  hyper
  sarcoma vs. melanoma

SEQ ID NO: 477873 - DNA, 132 bp, Homo sapiens; identical to SEQ ID NO: 356740
  chr1:40158183-40158315
  hyper
  sarcoma vs. anorectal,ovary

SEQ ID NO: 477874 - DNA, 352 bp, Homo sapiens; identical to SEQ ID NO: 468565
  chr1:40782323-40782675
  hyper
  sarcoma vs. cervical,ovary

SEQ ID NO: 477875 - DNA, 52 bp, Homo sapiens; identical to SEQ ID NO: 349222
  chr1:40782908-40782960
  hyper
  sarcoma vs. cervical,ovary

SEQ ID NO: 477876 - DNA, 1 bp, Homo sapiens
  chr1:41284752-41284753
  hyper
  sarcoma vs. non_cancer,multiple_myeloma,thyroid, bladder_and_urothelial
c

SEQ ID NO: 477877 - DNA, 189 bp, Homo sapiens; identical to SEQ ID NO: 468568
  chr1:46954676-46954865
  hyper
  sarcoma vs. pancreas_gallbladder,colorectal, bladder_and_urothelial,anorectal,ovary,breast,uterine, multiple_myeloma,non_cancer,thyroid,upper_gi,head_and_neck, cervical,lung

SEQ ID NO: 477878 - DNA, 392 bp, Homo sapiens; identical to SEQ ID NO: 349231
  chr1:46954904-46955296
  hyper
  sarcoma vs. pancreas_gallbladder,colorectal, bladder_and_urothelial,anorectal,ovary,breast,uterine, multiple_myeloma,non_cancer,thyroid,upper_gi,head_and_neck, cervical,lung

SEQ ID NO: 477879 - DNA, 264 bp, Homo sapiens; identical to SEQ ID NO: 457265
  chr1:46955978-46956242
  hyper
  sarcoma vs. myeloid_neoplasm

SEQ ID NO: 477880 - DNA, 255 bp, Homo sapiens; identical to SEQ ID NO: 346339
  chr1:46957171-46957426
  hyper
  sarcoma vs. myeloid_neoplasm,non_cancer

SEQ ID NO: 477881 - DNA, 135 bp, Homo sapiens; identical to SEQ ID NO: 356760
  chr1:48559554-48559689
  hyper
  sarcoma vs. head_and_neck,ovary,lung,upper_gi, liver_bileduct,breast,colorectal,pancreas_gallbladder

SEQ ID NO: 477882 - DNA, 32 bp, Homo sapiens; identical to SEQ ID NO: 455525
  chr1:52194847-52194879
  hyper
  sarcoma vs. lymphoid_neoplasm,pancreas_gallbladder,renal, lung,ovary,bladder_and_urothelial,uterine,myeloid_neoplasm, thyroid,upper_gi,non_cancer,multiple_myeloma,liver_bileduct, colorectal,melanoma

SEQ ID NO: 477883 - DNA, 323 bp, Homo sapiens; identical to SEQ ID NO: 455526
  chr1:52194968-52195291
  hyper
  sarcoma vs. lymphoid_neoplasm,pancreas_gallbladder,renal, lung,ovary,bladder_and_urothelial,uterine,myeloid_neoplasm, thyroid,upper_gi,non_cancer,multiple_myeloma,liver_bileduct, colorectal,melanoma

SEQ ID NO: 477884 - DNA, 387 bp, Homo sapiens; identical to SEQ ID NO: 455527
  chr1:52195348-52195735
  hyper
  sarcoma vs. lymphoid_neoplasm,pancreas_gallbladder,renal, lung,ovary,bladder_and_urothelial,uterine,myeloid_neoplasm, thyroid,upper_gi,non_cancer,multiple_myeloma,liver_bileduct, colorectal,melanoma

SEQ ID NO: 477885 - DNA, 52 bp, Homo sapiens
  chr1:52195239-52195291
  hyper
  sarcoma vs. pancreas_gallbladder,lymphoid_neoplasm,ovary, lung,renal,bladder_and_urothelial,multiple_myeloma,uterine, upper_gi,liver_bileduct,myeloid_neoplasm,non_cancer,thyroid
cggctgggtcgcgggtctgggcggggcgctccggacgccctcccgccgctgc

SEQ ID NO: 477886 - DNA, 778 bp, Homo sapiens; identical to SEQ ID NO: 344958
  chr1:52195348-52196126
  hyper
  sarcoma vs. pancreas_gallbladder,lymphoid_neoplasm,ovary, lung,renal,bladder_and_urothelial,multiple_myeloma,uterine, upper_gi,liver_bileduct,myeloid_neoplasm,non_cancer,thyroid

SEQ ID NO: 477887 - DNA, 949 bp, Homo sapiens; identical to SEQ ID NO: 349242
  chr1:53017742-53018691
  hyper
  sarcoma vs. lung,ovary,renal,lymphoid_neoplasm, liver_bileduct,head_and_neck,prostate,uterine,melanoma, colorectal,bladder_and_urothelial,cervical

SEQ ID NO: 477888 - DNA, 137 bp, Homo sapiens; identical to SEQ ID NO: 452716
  chr1:53168691-53168828
  hyper
  sarcoma vs. renal,upper_gi,lymphoid_neoplasm, bladder_and_urothelial,cervical,pancreas_gallbladder,non_cancer, thyroid,multiple_myeloma,uterine,prostate

SEQ ID NO: 477889 - DNA, 435 bp, Homo sapiens; identical to SEQ ID NO: 346344
  chr1:59281487-59281922
  hyper
  sarcoma vs. melanoma,liver_bileduct,head_and_neck,renal, breast,pancreas_gallbladder,upper_gi,cervical,lymphoid_neoplasm, uterine,bladder_and_urothelial,colorectal,ovary,anorectal, multiple_myeloma

SEQ ID NO: 477890 - DNA, 1 bp, Homo sapiens
  chr1:60539349-60539350
  hyper
  sarcoma vs. multiple_myeloma,thyroid,colorectal
c

SEQ ID NO: 477891 - DNA, 216 bp, Homo sapiens; identical to SEQ ID NO: 349250
  chr1:60539399-60539615
  hyper
  sarcoma vs. multiple_myeloma,thyroid,colorectal

SEQ ID NO: 477892 - DNA, 260 bp, Homo sapiens; identical to SEQ ID NO: 452717
  chr1:63793072-63793332
  hyper
  sarcoma vs. thyroid,non_cancer

SEQ ID NO: 477893 - DNA, 267 bp, Homo sapiens
  chr1:63793072-63793339
  hyper
  sarcoma vs. uterine,non_cancer,thyroid,renal,prostate, anorectal,colorectal,multiple_myeloma,cervical, pancreas_gallbladder,upper_gi
tcaacactactgatatccactttttattccacttaagaaaaaaaaactaaaggaaggggggcagatttatttgcaataaaagaagaaagcgggttgatttttatggggaagattttagctttcggctacacacgcatttagacgtttctactttctctagcactcattcctagaaaaatcaatccagccctgaggcctgtggcccctagagcgttctcaggaccaaggtctgagttgggaccgcccgtatctagttcctcggagggg

SEQ ID NO: 477894 - DNA, 24 bp, Homo sapiens
  chr1:67773109-67773133
  hyper
  sarcoma vs. melanoma
cgtctctatggctgtgaacgctga

SEQ ID NO: 477895 - DNA, 47 bp, Homo sapiens; identical to SEQ ID NO: 349260
  chr1:67773780-67773827
  hyper
  sarcoma vs. melanoma

SEQ ID NO: 477896 - DNA, 185 bp, Homo sapiens; identical to SEQ ID NO: 455547
  chr1:101774910-101775095
  hyper
  sarcoma vs. head_and_neck,anorectal

SEQ ID NO: 477897 - DNA, 25 bp, Homo sapiens
  chr1:101775488-101775513
  hyper
  sarcoma vs. head_and_neck,anorectal
ctcttgtgttgcacttgtgtccccc

SEQ ID NO: 477898 - DNA, 144 bp, Homo sapiens; identical to SEQ ID NO: 468595
  chr1:110186004-110186148
  hyper
  sarcoma vs. lymphoid_neoplasm,head_and_neck, multiple_myeloma

SEQ ID NO: 477899 - DNA, 35 bp, Homo sapiens; identical to SEQ ID NO: 349301
  chr1:110186177-110186212
  hyper
  sarcoma vs. lymphoid_neoplasm,head_and_neck, multiple_myeloma

SEQ ID NO: 477900 - DNA, 84 bp, Homo sapiens; identical to SEQ ID NO: 330956
  chr1:150586185-150586269
  hyper
  sarcoma vs. liver_bileduct,lymphoid_neoplasm

SEQ ID NO: 477901 - DNA, 154 bp, Homo sapiens; identical to SEQ ID NO: 330960
  chr1:151566699-151566853
  hyper
  sarcoma vs. lung,head_and_neck,lymphoid_neoplasm, upper_gi,ovary,breast,pancreas_gallbladder,uterine,prostate, renal,liver_bileduct,multiple_myeloma,anorectal,colorectal, bladder_and_urothelial,cervical,thyroid,non_cancer

SEQ ID NO: 477902 - DNA, 12 bp, Homo sapiens
  chr1:155055094-155055106
  hyper
cggcattcgcct

SEQ ID NO: 477903 - DNA, 35 bp, Homo sapiens; identical to SEQ ID NO: 330975
  chr1:156036276-156036311
  hyper
  sarcoma vs. melanoma

SEQ ID NO: 477904 - DNA, 229 bp, Homo sapiens; identical to SEQ ID NO: 330977
  chr1:156326789-156327018
  hyper
  sarcoma vs. head_and_neck,upper_gi,lung

SEQ ID NO: 477905 - DNA, 423 bp, Homo sapiens
  chr1:156593638-156594061
  hyper
  sarcoma vs. anorectal,ovary,uterine
cgaggtcattcactctcatcgtggggccacggccacgctgccctgcgtcctgggcaccacgcctcccagctacaaggtgcgctggagcaaggtggagcctggggagctccgggaaacgctgatcctcatcaccaacggactgcacgcccgggggtatgggcccctgggagggcgcgccaggatgcggagggggcatcgactagacgcctccctggtcatcgcgggcgtgcgcctggaggacgagggccggtaccgctgcgagctcatcaacggcatcgaggacgagagcgtggcgctgaccttgagcttggagggtgaggcccttccgctcccgccccattcctgtgtagcagcgggtccgcctcgcctgggtctcccagggctccttcccagtatctcctccgcacccctggggaccccagc

SEQ ID NO: 477906 - DNA, 203 bp, Homo sapiens
  chr1:156594227-156594430
  hyper
  sarcoma vs. anorectal,ovary,uterine
acgcctggccacctactcccagctctaccagggtgagcggccgaacccagcacttcccaagccccgcggagctgtctcaggggcccgagagagggcgccaggcgagctcagtctggctcctgcctatgacgcctcttatccccgacctccgccgtctcccgccagcttggaccgagggtctggactggtgtaacgcgggctgg

SEQ ID NO: 477907 - DNA, 175 bp, Homo sapiens; identical to SEQ ID NO: 356898
  chr1:156662232-156662407
  hyper
  sarcoma vs. ovary,breast,lung,upper_gi,prostate

SEQ ID NO: 477908 - DNA, 396 bp, Homo sapiens; identical to SEQ ID NO: 330996
  chr1:160983499-160983895
  hyper
  sarcoma vs. liver_bileduct,lymphoid_neoplasm, pancreas_gallbladder,breast,anorectal,upper_gi,colorectal, head_and_neck,uterine,multiple_myeloma,non_cancer,prostate, cervical,myeloid_neoplasm

SEQ ID NO: 477909 - DNA, 935 bp, Homo sapiens; identical to SEQ ID NO: 344975
  chr1:160990384-160991319
  hyper
  sarcoma vs. lung,liver_bileduct,upper_gi,head_and_neck, breast,renal,prostate,bladder_and_urothelial,colorectal,ovary, thyroid,uterine,myeloid_neoplasm,melanoma,non_cancer, pancreas_gallbladder,multiple_myeloma,anorectal,cervical,
  CONT. FROM ABOVE: lymphoid_neoplasm

SEQ ID NO: 477910 - DNA, 205 bp, Homo sapiens
  chr1:165086756-165086961
  hyper
  sarcoma vs. myeloid_neoplasm
cgccggccgttctctccgcaggtgcccggcccctgcctccgagtgcgcctcgcggagcgcaaagcgctgtcacgactcggtggccgaggtgattaattagcggcgtggccgtgcgggggacgcgtgctggcctccacatctgccccgtgccagcaggggtcaatatgcggtgtcactgctttccctctcactccctccaaagcct

SEQ ID NO: 477911 - DNA, 60 bp, Homo sapiens; identical to SEQ ID NO: 349345
  chr1:165087027-165087087
  hyper
  sarcoma vs. myeloid_neoplasm

SEQ ID NO: 477912 - DNA, 328 bp, Homo sapiens; identical to SEQ ID NO: 331022
  chr1:169074766-169075094
  hyper
  sarcoma vs. ovary,pancreas_gallbladder,cervical,renal, bladder_and_urothelial,anorectal,lung,multiple_myeloma, liver_bileduct,breast,melanoma,upper_gi,myeloid_neoplasm, colorectal,thyroid,head_and_neck,uterine,non_cancer,prostate

SEQ ID NO: 477913 - DNA, 15 bp, Homo sapiens
  chr1:170629359-170629374
  hyper
  sarcoma vs. myeloid_neoplasm
cgcagcccaccctgc

SEQ ID NO: 477914 - DNA, 129 bp, Homo sapiens
  chr1:170629412-170629541
  hyper
  sarcoma vs. myeloid_neoplasm
ccagggcttggtccctgcagctgaggcctacgggatatcccaggaaagagcagcctctccgtagtggtgaagagtctctcaagccttagcgctctggtgacctccgcgggattctgagaaaagcactgc

SEQ ID NO: 477915 - DNA, 101 bp, Homo sapiens; identical to SEQ ID NO: 369316
  chr1:170629569-170629670
  hyper
  sarcoma vs. myeloid_neoplasm

SEQ ID NO: 477916 - DNA, 227 bp, Homo sapiens; identical to SEQ ID NO: 331035
  chr1:175161560-175161787
  hyper
  sarcoma vs. liver_bileduct

SEQ ID NO: 477917 - DNA, 78 bp, Homo sapiens; identical to SEQ ID NO: 464068
  chr1:182911469-182911547
  hyper
  sarcoma vs. bladder_and_urothelial,thyroid

SEQ ID NO: 477918 - DNA, 8 bp, Homo sapiens
  chr1:182911576-182911584
  hyper
  sarcoma vs. bladder_and_urothelial,thyroid
cgtggcgc

SEQ ID NO: 477919 - DNA, 151 bp, Homo sapiens; identical to SEQ ID NO: 331054
  chr1:184722819-184722970
  hyper
  sarcoma vs. breast,multiple_myeloma,cervical, lymphoid_neoplasm,upper_gi,liver_bileduct,pancreas_gallbladder, renal,colorectal,bladder_and_urothelial,lung,ovary,prostate, non_cancer,melanoma,uterine,anorectal

SEQ ID NO: 477920 - DNA, 100 bp, Homo sapiens
  chr1:197881313-197881413
  hyper
  sarcoma vs. bladder_and_urothelial,head_and_neck
cgccgcctcccgccgagaaccgagttctagttggggaaacgtctgacatctggacatcaaggtaagaccctgatggagatattttagtcggagcagtttt

SEQ ID NO: 477921 - DNA, 176 bp, Homo sapiens; identical to SEQ ID NO: 356959
  chr1:197881604-197881780
  hyper
  sarcoma vs. bladder_and_urothelial,head_and_neck

SEQ ID NO: 477922 - DNA, 255 bp, Homo sapiens; identical to SEQ ID NO: 331068
  chr1:200379717-200379972
  hyper
  sarcoma vs. lung,cervical,breast,head_and_neck,anorectal, prostate,lymphoid_neoplasm,bladder_and_urothelial, liver_bileduct,colorectal,renal,pancreas_gallbladder,ovary

SEQ ID NO: 477923 - DNA, 579 bp, Homo sapiens
  chr1:201449645-201450224
  hyper
  sarcoma vs. lung,bladder_and_urothelial,liver_bileduct, upper_gi,multiple_myeloma,head_and_neck,colorectal,breast,renal, anorectal,prostate,pancreas_gallbladder,cervical, lymphoid_neoplasm,uterine,thyroid,non_cancer,myeloid_neoplasm
cgttcagaggcagccccagctgcggggcggggcggggcggggcggggcggggcggggcgcggagctgttggcagctaagtggttgaggttgagcggccgggtggaggccggcacctactaggaggctgggctggtccgcaggttctcaagcccggctgagcccgggcaagcgtcagagaatcaccagagcagcttgtcgaatacagattcccaggccccacccaggccaaccgaatcagaatctctaggggtggggctgggaatccatttttaaaggcttccccaatgattctcagaataaaggttgggcttggaggcggggccggggctgggcgtggcacggaggcgaggcgcggggagggccggaccttccagttgttaatccctgtgttcctcactccgccacactcacctccactgatctaagtcgggggatcgttcctcgctgggtgcccccctcacttgatcttagccaaaaggtcgagaagcgattgggagcccctctcgaataatttctgtggcccttgattcagggatcactcccacacttaatagcagctctaacgccccccaaccccc

SEQ ID NO: 477924 - DNA, 1 bp, Homo sapiens
  chr1:201450300-201450301
  hyper
  sarcoma vs. lung,bladder_and_urothelial,liver_bileduct, upper_gi,multiple_myeloma,head_and_neck,colorectal,breast,renal, anorectal,prostate,pancreas_gallbladder,cervical, lymphoid_neoplasm,uterine,thyroid,non_cancer,myeloid_neoplasm
c

SEQ ID NO: 477925 - DNA, 160 bp, Homo sapiens; identical to SEQ ID NO: 331074
  chr1:202112280-202112440
  hyper
  sarcoma vs. breast,cervical,myeloid_neoplasm

SEQ ID NO: 477926 - DNA, 80 bp, Homo sapiens; identical to SEQ ID NO: 349379
  chr1:202613545-202613625
  hyper
  sarcoma vs. bladder_and_urothelial,anorectal

SEQ ID NO: 477927 - DNA, 111 bp, Homo sapiens; identical to SEQ ID NO: 369384
  chr1:209979376-209979487
  hyper
  sarcoma vs. head_and_neck

SEQ ID NO: 477928 - DNA, 124 bp, Homo sapiens
  chr1:209979489-209979613
  hyper
  sarcoma vs. head_and_neck
ctcgccccaggacgccgcagccttcgcatccgcccggccacgcctcccaggtgtggccacgccccccggcgttcgggattggcgagttgcaagaaatatgacactccgcgtttctgggctgccc

SEQ ID NO: 477929 - DNA, 1 bp, Homo sapiens
  chr1:209979634-209979635
  hyper
  sarcoma vs. head_and_neck
c

SEQ ID NO: 477930 - DNA, 279 bp, Homo sapiens; identical to SEQ ID NO: 331104
  chr1:214453844-214454123
  hyper
  sarcoma vs. lung,ovary,liver_bileduct,uterine,renal

SEQ ID NO: 477931 - DNA, 42 bp, Homo sapiens; identical to SEQ ID NO: 331120
  chr1:220950193-220950235
  hyper
  sarcoma vs. upper_gi,renal,bladder_and_urothelial, prostate,pancreas_gallbladder,ovary,lung,head_and_neck

SEQ ID NO: 477932 - DNA, 38 bp, Homo sapiens; identical to SEQ ID NO: 452747
  chr1:223936543-223936581
  hyper
  sarcoma vs. myeloid_neoplasm,thyroid,non_cancer,prostate

SEQ ID NO: 477933 - DNA, 44 bp, Homo sapiens; identical to SEQ ID NO: 357043
  chr1:231053141-231053185
  hyper
  sarcoma vs. lymphoid_neoplasm,colorectal

SEQ ID NO: 477934 - DNA, 588 bp, Homo sapiens; identical to SEQ ID NO: 455574
  chr1:231175062-231175650
  hyper
  sarcoma vs. melanoma

SEQ ID NO: 477935 - DNA, 286 bp, Homo sapiens; identical to SEQ ID NO: 455575
  chr1:231175692-231175978
  hyper
  sarcoma vs. melanoma

SEQ ID NO: 477936 - DNA, 175 bp, Homo sapiens; identical to SEQ ID NO: 464082
  chr1:234736252-234736427
  hyper
  sarcoma vs. melanoma,breast,bladder_and_urothelial, pancreas_gallbladder,colorectal,liver_bileduct,anorectal

SEQ ID NO: 477937 - DNA, 667 bp, Homo sapiens; identical to SEQ ID NO: 455580
  chr10:6621854-6622521
  hyper
  sarcoma vs. melanoma,ovary

SEQ ID NO: 477938 - DNA, 87 bp, Homo sapiens; identical to SEQ ID NO: 350979
  chr10:6622706-6622793
  hyper
  sarcoma vs. melanoma,ovary

SEQ ID NO: 477939 - DNA, 125 bp, Homo sapiens
  chr10:30509077-30509202
  hyper
  sarcoma vs. head_and_neck,breast,lung
cgctcttcccgggcagccccatgttccagggagccaaagcttgcagcgtgagagggtctctttttggaacaaaggtcggtgagtgaagtcaagtccaggcttggttttgagagatcacatgtcag

SEQ ID NO: 477940 - DNA, 157 bp, Homo sapiens; identical to SEQ ID NO: 333915
  chr10:31607149-31607306
  hyper
  sarcoma vs. lymphoid_neoplasm,lung,head_and_neck,renal, prostate,colorectal,breast,multiple_myeloma,cervical,upper_gi

SEQ ID NO: 477941 - DNA, 701 bp, Homo sapiens; identical to SEQ ID NO: 470960
  chr10:43892074-43892775
  hyper
  sarcoma vs. melanoma

SEQ ID NO: 477942 - DNA, 398 bp, Homo sapiens; identical to SEQ ID NO: 454118
  chr10:43892377-43892775
  hyper
  sarcoma vs. melanoma,lymphoid_neoplasm

SEQ ID NO: 477943 - DNA, 171 bp, Homo sapiens; identical to SEQ ID NO: 347088
  chr10:43892970-43893141
  hyper
  sarcoma vs. melanoma,lymphoid_neoplasm

SEQ ID NO: 477944 - DNA, 49 bp, Homo sapiens; identical to SEQ ID NO: 475280
  chr10:60026209-60026258
  hyper
  sarcoma vs. melanoma

SEQ ID NO: 477945 - DNA, 1 bp, Homo sapiens
  chr10:60026303-60026304
  hyper
  sarcoma vs. melanoma
c

SEQ ID NO: 477946 - DNA, 256 bp, Homo sapiens; identical to SEQ ID NO: 351043
  chr10:62492589-62492845
  hyper
  sarcoma vs. head_and_neck,lung,ovary,breast

SEQ ID NO: 477947 - DNA, 66 bp, Homo sapiens
  chr10:71267698-71267764
  hyper
  sarcoma vs. melanoma
cggagttgcccacaggtccacctaccgcgctccctgcagccctcagtgtgcctaatggctgccgcg

SEQ ID NO: 477948 - DNA, 38 bp, Homo sapiens; identical to SEQ ID NO: 359585
  chr10:71267805-71267843
  hyper
  sarcoma vs. melanoma

SEQ ID NO: 477949 - DNA, 418 bp, Homo sapiens; identical to SEQ ID NO: 468646
  chr10:89621342-89621760
  hyper
  sarcoma vs. breast,prostate,bladder_and_urothelial, cervical,renal,colorectal,upper_gi,liver_bileduct, pancreas_gallbladder,myeloid_neoplasm,uterine,head_and_neck, multiple_myeloma,non_cancer,anorectal

SEQ ID NO: 477950 - DNA, 148 bp, Homo sapiens; identical to SEQ ID NO: 202167
  chr10:89621836-89621984
  hyper
  sarcoma vs. breast,prostate,bladder_and_urothelial, cervical,renal,colorectal,upper_gi,liver_bileduct, pancreas_gallbladder,myeloid_neoplasm,uterine,head_and_neck, multiple_myeloma,non_cancer,anorectal

SEQ ID NO: 477951 - DNA, 352 bp, Homo sapiens; identical to SEQ ID NO: 468648
  chr10:89621986-89622338
  hyper
  sarcoma vs. breast,prostate,bladder_and_urothelial, cervical,renal,colorectal,upper_gi,liver_bileduct, pancreas_gallbladder,myeloid_neoplasm,uterine,head_and_neck, multiple_myeloma,non_cancer,anorectal

SEQ ID NO: 477952 - DNA, 123 bp, Homo sapiens; identical to SEQ ID NO: 468649
  chr10:89621861-89621984
  hyper
  sarcoma vs. upper_gi,pancreas_gallbladder,colorectal, breast

SEQ ID NO: 477953 - DNA, 852 bp, Homo sapiens; identical to SEQ ID NO: 468650
  chr10:89621986-89622838
  hyper
  sarcoma vs. upper_gi,pancreas_gallbladder,colorectal, breast

SEQ ID NO: 477954 - DNA, 8 bp, Homo sapiens
  chr10:102490242-102490250
  hyper
  sarcoma vs. head_and_neck,ovary
cgctgcct

SEQ ID NO: 477955 - DNA, 331 bp, Homo sapiens; identical to SEQ ID NO: 455597
  chr10:102490316-102490647
  hyper
  sarcoma vs. head_and_neck,ovary

SEQ ID NO: 477956 - DNA, 414 bp, Homo sapiens; identical to SEQ ID NO: 359652
  chr10:102490715-102491129
  hyper
  sarcoma vs. head_and_neck,ovary

SEQ ID NO: 477957 - DNA, 261 bp, Homo sapiens; identical to SEQ ID NO: 372519
  chr10:104221426-104221687
  hyper
  sarcoma vs. upper_gi,lung

SEQ ID NO: 477958 - DNA, 233 bp, Homo sapiens; identical to SEQ ID NO: 464100
  chr10:112403994-112404227
  hyper
  sarcoma vs. prostate

SEQ ID NO: 477959 - DNA, 654 bp, Homo sapiens; identical to SEQ ID NO: 334071
  chr10:114708972-114709626
  hyper
  sarcoma vs. colorectal

SEQ ID NO: 477960 - DNA, 542 bp, Homo sapiens; identical to SEQ ID NO: 334087
  chr10:119293016-119293558
  hyper
  sarcoma vs. liver_bileduct

SEQ ID NO: 477961 - DNA, 203 bp, Homo sapiens; identical to SEQ ID NO: 464108
  chr10:124899352-124899555
  hyper

SEQ ID NO: 477962 - DNA, 129 bp, Homo sapiens
  chr10:134209485-134209614
  hyper
  sarcoma vs. cervical,colorectal,uterine, pancreas_gallbladder
cgaggtcgacaggcgccagcgacccgacggtccccagtggcaccaggggcggtggtcctcaattcccaggctgggaggagccctgcccggcggcgctgggtcgccaggacaactacgcggtcccccgcc

SEQ ID NO: 477963 - DNA, 126 bp, Homo sapiens; identical to SEQ ID NO: 359726
  chr10:134209650-134209776
  hyper
  sarcoma vs. cervical,colorectal,uterine, pancreas_gallbladder

SEQ ID NO: 477964 - DNA, 317 bp, Homo sapiens; identical to SEQ ID NO: 334173
  chr11:12849699-12850016
  hyper
  sarcoma vs. liver_bileduct,colorectal,ovary,breast

SEQ ID NO: 477965 - DNA, 203 bp, Homo sapiens; identical to SEQ ID NO: 475302
  chr11:13300232-13300435
  hyper
  sarcoma vs. ovary

SEQ ID NO: 477966 - DNA, 87 bp, Homo sapiens; identical to SEQ ID NO: 464114
  chr11:20230312-20230399
  hyper
  sarcoma vs. anorectal,prostate

SEQ ID NO: 477967 - DNA, 53 bp, Homo sapiens; identical to SEQ ID NO: 351169
  chr11:20230510-20230563
  hyper
  sarcoma vs. anorectal,prostate

SEQ ID NO: 477968 - DNA, 197 bp, Homo sapiens; identical to SEQ ID NO: 468676
  chr11:20385084-20385281
  hyper
  sarcoma vs. liver_bileduct

SEQ ID NO: 477969 - DNA, 238 bp, Homo sapiens; identical to SEQ ID NO: 468677
  chr11:20385481-20385719
  hyper
  sarcoma vs. liver_bileduct

SEQ ID NO: 477970 - DNA, 474 bp, Homo sapiens
  chr11:31818829-31819303
  hyper
  sarcoma vs. myeloid_neoplasm,thyroid,multiple_myeloma, non_cancer
cgaagaaccccgccgatagcatgctctgctctcatttgcctctttgacattttcttaattttaaaacatggagattcacattcttatccatgttctgtctcacacaaacatacacacgggtttacacaggcagcacgcgatcgccgccaggccctgtgctgcctccagaactgacacttaagagagaaaagtcagcagggacagtagagctcaattttaaatctggaaaaaaaaaaaaaaaaaaaaaagatgggaagcggggattggaattccacagcaaaaagaaacctgtcgctgcaggatcccttctctaccccgcggggagagcggcacggagacagttcattactttagaagtggcaactgtttgcagccaggcggtgacctagcggctgctcttacataaaatgggtacatttccccccactttagtggatttgccttccactcttaaagcttttaacaaaataaaac

SEQ ID NO: 477971 - DNA, 225 bp, Homo sapiens; identical to SEQ ID NO: 464116
  chr11:31821778-31822003
  hyper
  sarcoma vs. myeloid_neoplasm,thyroid

SEQ ID NO: 477972 - DNA, 44 bp, Homo sapiens
  chr11:31823122-31823166
  hyper
  sarcoma vs. non_cancer,thyroid,prostate,multiple_myeloma
cgttggtacagaccccctcggacagtaatctgtctcggatttcc

SEQ ID NO: 477973 - DNA, 30 bp, Homo sapiens
  chr11:31823252-31823282
  hyper
  sarcoma vs. non_cancer,thyroid,prostate,multiple_myeloma
gattgccctgggtctgatggagccagtctc

SEQ ID NO: 477974 - DNA, 100 bp, Homo sapiens; identical to SEQ ID NO: 351175
  chr11:31842276-31842376
  hyper
  sarcoma vs. myeloid_neoplasm,thyroid

SEQ ID NO: 477975 - DNA, 384 bp, Homo sapiens; identical to SEQ ID NO: 334231
  chr11:32851566-32851950
  hyper
  sarcoma vs. lung,liver_bileduct,bladder_and_urothelial

SEQ ID NO: 477976 - DNA, 59 bp, Homo sapiens; identical to SEQ ID NO: 334253
  chr11:45392759-45392818
  hyper
  sarcoma vs. melanoma

SEQ ID NO: 477977 - DNA, 22 bp, Homo sapiens
  chr11:57243645-57243667
  hyper
cgcggacctggccaacctgagc

SEQ ID NO: 477978 - DNA, 432 bp, Homo sapiens
  chr11:57243735-57244167
  hyper
ggaccggctgctgctgcacgggaaccggctgcagggcgtgcaccgcgcggccttccgcggcctcagccgcctcaccatcctctacctgttcaacaacagcctggcctcgctgcccggcgaggcgctcgccgacctgccctcgctcgagttcctgcggctcaacgctaacccctgggcgtgcgactgccgcgcgcggccgctctgggcctggttccagcgcgcgcgcgtgtccagctccgacgtgacctgcgccacccccccggagcgccagggccgagacctgcgcgcgctccgcgaggccgacttccaggcgtgtccgcccgcggcacccacgcggccgggcagccgcgcccgcggcaacagctcctccaaccacctgtacggggtggccgaggccggggcgcccccagccgatccctccaccctctaccg

SEQ ID NO: 477979 - DNA, 43 bp, Homo sapiens
  chr11:59323829-59323872
  hyper
  sarcoma vs. renal
cgcgaagggaaagaatgcggccacgtggcctattttcctgtgg

SEQ ID NO: 477980 - DNA, 61 bp, Homo sapiens
  chr11:59323899-59323960
  hyper
  sarcoma vs. renal
gggcccggatagctcagtcggtagagcatcagacttttaatctgagggtccggggttcaag

SEQ ID NO: 477981 - DNA, 187 bp, Homo sapiens; identical to SEQ ID NO: 359841
  chr11:59323987-59324174
  hyper
  sarcoma vs. renal

SEQ ID NO: 477982 - DNA, 231 bp, Homo sapiens; identical to SEQ ID NO: 468684
  chr11:61062458-61062689
  hyper
  sarcoma vs. thyroid,myeloid_neoplasm,non_cancer

SEQ ID NO: 477983 - DNA, 176 bp, Homo sapiens; identical to SEQ ID NO: 334274
  chr11:61659371-61659547
  hyper
  sarcoma vs. lung,ovary,lymphoid_neoplasm,cervical, upper_gi,pancreas_gallbladder,head_and_neck,breast,colorectal, prostate,renal,bladder_and_urothelial,uterine

SEQ ID NO: 477984 - DNA, 231 bp, Homo sapiens; identical to SEQ ID NO: 334280
  chr11:63705659-63705890
  hyper
  sarcoma vs. lung,head_and_neck,liver_bileduct,ovary, upper_gi,melanoma,breast,lymphoid_neoplasm,pancreas_gallbladder, uterine,bladder_and_urothelial

SEQ ID NO: 477985 - DNA, 83 bp, Homo sapiens
  chr11:64064539-64064622
  hyper
  sarcoma vs. uterine,lymphoid_neoplasm, bladder_and_urothelial,cervical,multiple_myeloma,renal, non_cancer,upper_gi,myeloid_neoplasm,thyroid,lung
cggaggggtcccaggtggcccctagacttcctgcatcgcccctctgcccaggctatggcaatgtggccctgcgcacagatgcc

SEQ ID NO: 477986 - DNA, 369 bp, Homo sapiens; identical to SEQ ID NO: 351213
  chr11:64064662-64065031
  hyper
  sarcoma vs. uterine,lymphoid_neoplasm, bladder_and_urothelial,cervical,multiple_myeloma,renal, non_cancer,upper_gi,myeloid_neoplasm,thyroid,lung

SEQ ID NO: 477987 - DNA, 626 bp, Homo sapiens
  chr11:64067396-64068022
  hyper
  sarcoma vs. pancreas_gallbladder
cgctgccccgggcgggtgtatccctcacagcacctcacgactgtgcctcaaagcctgcatcaataaatgaaaacggtctgcaccgctgcgggcgtgacgctcccggacgcgagtgggtgtggaattgctttcctcgggccaccgtgggggcacctctggcctcccgtgacccccaggccgagggtccccgggcacccaggtcggtcaagtctcggccctctcaggcccgcgtctctgcctggaggagactgtgtagggtccggcgtggggatcagccaggatgggctgcgcgtctccagcctctgcacacacattggcgggtggggtgcagggagggagaggcaggggagagagaatggcatctcgcgtggagggctgtcgtttgaactctcccagcgcgagagaccctgccccgcccccttcctggagcgttgactcccttctcgtctcgaggcctgtggcgtctgggtccgttggggcagaaccatggaggaaaagccttcgaaagtaagacgtctccctaggccccttaccctgtccgctccaacccacccttggtccgactcgggcccctggcgctatttcttactcagccttggctgcccgcagcccccacccaaccccac

SEQ ID NO: 477988 - DNA, 263 bp, Homo sapiens
  chr11:64068047-64068310
  hyper
  sarcoma vs. pancreas_gallbladder
cggctcagttccccagcccgctcttccttcccgctccagccatccgcgacccttggctccctccttgtatgtggcccacaggtgtcgctcaagtcttccgaccgccaaggctcggacgaggagagcgtgcatagcgacactcgggacctgtggaccacgaccacgctgtcccaggcacagctgaacatgccgctgtccgaggtctgcgagggcttcgacgaggagggccgcaacattagcaagacccgcgggtggcacagccc

SEQ ID NO: 477989 - DNA, 197 bp, Homo sapiens
  chr11:64067825-64068022
  hyper
  sarcoma vs. lung,liver_bileduct,ovary,colorectal, bladder_and_urothelial,breast
cgttgactcccttctcgtctcgaggcctgtggcgtctgggtccgttggggcagaaccatggaggaaaagccttcgaaagtaagacgtctccctaggccccttaccctgtccgctccaacccacccttggtccgactcgggcccctggcgctatttcttactcagccttggctgcccgcagcccccacccaaccccac

SEQ ID NO: 477990 - DNA, 679 bp, Homo sapiens; identical to SEQ ID NO: 359862
  chr11:64068047-64068726
  hyper
  sarcoma vs. lung,liver_bileduct,ovary,colorectal, bladder_and_urothelial,breast

SEQ ID NO: 477991 - DNA, 87 bp, Homo sapiens
  chr11:64509676-64509763
  hyper
  sarcoma vs. lung,cervical,colorectal,anorectal,uterine, pancreas_gallbladder,breast,bladder_and_urothelial,ovary, prostate,head_and_neck,renal,multiple_myeloma
cgggtgcacgctcgaccccgcccacctcctgcttgcccaggactccgagagcaggaggcaaattagagaggaaaggtgtggtgggcg

SEQ ID NO: 477992 - DNA, 502 bp, Homo sapiens; identical to SEQ ID NO: 351215
  chr11:64509801-64510303
  hyper
  sarcoma vs. lung,cervical,colorectal,anorectal,uterine, pancreas_gallbladder,breast,bladder_and_urothelial,ovary, prostate,head_and_neck,renal,multiple_myeloma

SEQ ID NO: 477993 - DNA, 330 bp, Homo sapiens
  chr11:66187467-66187797
  hyper
  sarcoma vs. melanoma,renal,prostate,myeloid_neoplasm
cccgcccgccgcagccgcggcagccgccggaggattcctgtcctaatatggagctgggattcccccggccccgcccccgcccccggcccgcggggagacagaggctggcagcagggcggggggaagcgctcgcttgggggccggcaacggggggaagggatgcctaagtgcagacccaggtcctcgccgtgcccccacgtccctgcctcagtttccccttcagtaaggttaattagctgagagggaaaccacgaatcactgcagactacagcgctgatgttggtttctattcttggctgtgggaaaacaggatcaacgccaaattcagct

SEQ ID NO: 477994 - DNA, 270 bp, Homo sapiens
  chr11:66187826-66188096
  hyper
  sarcoma vs. melanoma,renal,prostate,myeloid_neoplasm
cccatcctcgggacttagacccccatgaacaccccctgataagccgccaaggcccgatttgggaagcgggggcgggaatttgttctctaaaaatggccaagggaatcccaggttaaatagtccccagagaggaaccccagcagtgacctgtcccacggaggccaaggaaagtcctccttccctgcatgtgaacgtgaccttgtctgtcaagtaacgagggggatttgtagacaaccctgttcttccccattccctcaactcctcagaaaa

SEQ ID NO: 477995 - DNA, 226 bp, Homo sapiens
  chr11:66187870-66188096
  hyper
  sarcoma vs. melanoma,prostate,thyroid,renal,non_cancer, multiple_myeloma,ovary,myeloid_neoplasm
cgccaaggcccgatttgggaagcgggggcgggaatttgttctctaaaaatggccaagggaatcccaggttaaatagtccccagagaggaaccccagcagtgacctgtcccacggaggccaaggaaagtcctccttccctgcatgtgaacgtgaccttgtctgtcaagtaacgagggggatttgtagacaaccctgttcttccccattccctcaactcctcagaaaa

SEQ ID NO: 477996 - DNA, 162 bp, Homo sapiens; identical to SEQ ID NO: 351227
  chr11:66189149-66189311
  hyper
  sarcoma vs. prostate,thyroid,multiple_myeloma,ovary, non_cancer,renal,melanoma

SEQ ID NO: 477997 - DNA, 2 bp, Homo sapiens
  chr11:67232076-67232078
  hyper
  sarcoma vs. cervical,liver_bileduct,melanoma, lymphoid_neoplasm,renal,anorectal,colorectal, pancreas_gallbladder,uterine,upper_gi,myeloid_neoplasm, multiple_myeloma,non_cancer,bladder_and_urothelial,prostate,
  CONT. FROM ABOVE: thyroid,lung,head_and_neck,ovary, breast
cg

SEQ ID NO: 477998 - DNA, 120 bp, Homo sapiens; identical to SEQ ID NO: 455619
  chr11:67232283-67232403
  hyper
  sarcoma vs. cervical,liver_bileduct,melanoma, lymphoid_neoplasm,renal,anorectal,colorectal, pancreas_gallbladder,uterine,upper_gi,myeloid_neoplasm, multiple_myeloma,non_cancer,bladder_and_urothelial,prostate,
  CONT. FROM ABOVE: thyroid,lung,head_and_neck,ovary, breast

SEQ ID NO: 477999 - DNA, 127 bp, Homo sapiens; identical to SEQ ID NO: 345397
  chr11:67232464-67232591
  hyper
  sarcoma vs. cervical,liver_bileduct,melanoma, lymphoid_neoplasm,renal,anorectal,colorectal, pancreas_gallbladder,uterine,upper_gi,myeloid_neoplasm, multiple_myeloma,non_cancer,bladder_and_urothelial,prostate,
  CONT. FROM ABOVE: thyroid,lung,head_and_neck,ovary, breast

SEQ ID NO: 478000 - DNA, 270 bp, Homo sapiens; identical to SEQ ID NO: 464123
  chr11:68095765-68096035
  hyper
  sarcoma vs. melanoma

SEQ ID NO: 478001 - DNA, 156 bp, Homo sapiens; identical to SEQ ID NO: 351234
  chr11:68611259-68611415
  hyper
  sarcoma vs. lung,colorectal,head_and_neck

SEQ ID NO: 478002 - DNA, 398 bp, Homo sapiens
  chr11:71951738-71952136
  hyper
  sarcoma vs. anorectal
cacaaactcagcctcccgggctccgggttttcaaagctgcagcgccggggtagggaaccccaggggtgctgactggcctgccccctctcctcctcagctcggccctgaggtcccctgggtctccccctctagcccctcggcctccctcctggcttctcaagcatcactcggaactttctgccctaagagggagacagagcggaggtagcctggagctaaacagatcgggtctcccaagggcctccaagtccgggccctgctgcctcccgtagctgcccaagcaccctgggaccgcgccctgccttcgggctgcatctgcctgtattcccctacccccaggtgttagacattaagctcccacacctccttccatgcgcactctcgtacacacacgtgca

SEQ ID NO: 478003 - DNA, 510 bp, Homo sapiens; identical to SEQ ID NO: 452797
  chr11:76381512-76382022
  hyper
  sarcoma vs. multiple_myeloma,lymphoid_neoplasm, non_cancer,thyroid,myeloid_neoplasm,bladder_and_urothelial, prostate,breast

SEQ ID NO: 478004 - DNA, 30 bp, Homo sapiens; identical to SEQ ID NO: 452798
  chr11:76382264-76382294
  hyper
  sarcoma vs. multiple_myeloma,lymphoid_neoplasm, non_cancer,thyroid,myeloid_neoplasm,bladder_and_urothelial, prostate,breast

SEQ ID NO: 478005 - DNA, 501 bp, Homo sapiens; identical to SEQ ID NO: 334338
  chr11:84148462-84148963
  hyper
  sarcoma vs. liver_bileduct

SEQ ID NO: 478006 - DNA, 191 bp, Homo sapiens; identical to SEQ ID NO: 334392
  chr11:124616924-124617115
  hyper
  sarcoma vs. liver_bileduct,upper_gi,lung

SEQ ID NO: 478007 - DNA, 2 bp, Homo sapiens
  chr11:124631501-124631503
  hyper
  sarcoma vs. pancreas_gallbladder,cervical,anorectal, renal,non_cancer,bladder_and_urothelial,thyroid
cg

SEQ ID NO: 478008 - DNA, 71 bp, Homo sapiens; identical to SEQ ID NO: 351268
  chr11:124631910-124631981
  hyper
  sarcoma vs. pancreas_gallbladder,cervical,anorectal, renal,non_cancer,bladder_and_urothelial,thyroid

SEQ ID NO: 478009 - DNA, 245 bp, Homo sapiens; identical to SEQ ID NO: 334409
  chr11:130183478-130183723
  hyper
  sarcoma vs. lung,head_and_neck,liver_bileduct,melanoma, pancreas_gallbladder,ovary,upper_gi,breast,lymphoid_neoplasm, colorectal,renal,prostate,uterine

SEQ ID NO: 478010 - DNA, 254 bp, Homo sapiens; identical to SEQ ID NO: 334433
  chr12:2692239-2692493
  hyper
  sarcoma vs. melanoma,ovary,renal

SEQ ID NO: 478011 - DNA, 1 bp, Homo sapiens
  chr12:2800445-2800446
  hyper
  sarcoma vs. myeloid_neoplasm,uterine,prostate,renal, non_cancer,thyroid,lung,head_and_neck,melanoma,multiple_myeloma, cervical,bladder_and_urothelial,ovary,anorectal
c

SEQ ID NO: 478012 - DNA, 239 bp, Homo sapiens
  chr12:2800603-2800842
  hyper
  sarcoma vs. myeloid_neoplasm,uterine,prostate,renal, non_cancer,thyroid,lung,head_and_neck,melanoma,multiple_myeloma, cervical,bladder_and_urothelial,ovary,anorectal
gcctgccctctcccagctcgcaggccccgggcccggccgcgcctccgcggggagagcaccccggcttcccgcgcgccctcaccaaaaggaccctacagcaaacgggtgtctttcgactctgcttgtagaaaccatttgcacatattctgtacgagcctcgctgtctccctagagccagggccctgcggatttggagaagggagcggggcaggacttccaggaggaccccaacccggccc

SEQ ID NO: 478013 - DNA, 245 bp, Homo sapiens; identical to SEQ ID NO: 347197
  chr12:2801019-2801264
  hyper
  sarcoma vs. myeloid_neoplasm,uterine,prostate,renal, non_cancer,thyroid,lung,head_and_neck,melanoma,multiple_myeloma, cervical,bladder_and_urothelial,ovary,anorectal

SEQ ID NO: 478014 - DNA, 142 bp, Homo sapiens; identical to SEQ ID NO: 334436
  chr12:3053936-3054078
  hyper
  sarcoma vs. pancreas_gallbladder,head_and_neck, lymphoid_neoplasm,upper_gi,bladder_and_urothelial,uterine, prostate,lung,cervical,colorectal,renal,multiple_myeloma

SEQ ID NO: 478015 - DNA, 242 bp, Homo sapiens; identical to SEQ ID NO: 466283
  chr12:6472613-6472855
  hyper
  sarcoma vs. bladder_and_urothelial,anorectal,breast, pancreas_gallbladder,liver_bileduct,myeloid_neoplasm,upper_gi, renal,head_and_neck,colorectal,uterine

SEQ ID NO: 478016 - DNA, 95 bp, Homo sapiens; identical to SEQ ID NO: 466284
  chr12:6472900-6472995
  hyper
  sarcoma vs. bladder_and_urothelial,anorectal,breast, pancreas_gallbladder,liver_bileduct,myeloid_neoplasm,upper_gi, renal,head_and_neck,colorectal,uterine

SEQ ID NO: 478017 - DNA, 4 bp, Homo sapiens
  chr12:6473162-6473166
  hyper
  sarcoma vs. bladder_and_urothelial,anorectal,breast, pancreas_gallbladder,liver_bileduct,myeloid_neoplasm,upper_gi, renal,head_and_neck,colorectal,uterine
gccc

SEQ ID NO: 478018 - DNA, 539 bp, Homo sapiens; identical to SEQ ID NO: 360020
  chr12:7260775-7261314
  hyper
  sarcoma vs. lymphoid_neoplasm,liver_bileduct, head_and_neck

SEQ ID NO: 478019 - DNA, 233 bp, Homo sapiens; identical to SEQ ID NO: 334476
  chr12:22778949-22779182
  hyper
  sarcoma vs. lung,head_and_neck,liver_bileduct,melanoma, lymphoid_neoplasm,breast,colorectal,pancreas_gallbladder, bladder_and_urothelial

SEQ ID NO: 478020 - DNA, 47 bp, Homo sapiens; identical to SEQ ID NO: 334499
  chr12:46663360-46663407
  hyper
  sarcoma vs. cervical

SEQ ID NO: 478021 - DNA, 335 bp, Homo sapiens; identical to SEQ ID NO: 468698
  chr12:46766939-46767274
  hyper
  sarcoma vs. head_and_neck

SEQ ID NO: 478022 - DNA, 61 bp, Homo sapiens; identical to SEQ ID NO: 455654
  chr12:49392537-49392598
  hyper
  sarcoma vs. multiple_myeloma,thyroid

SEQ ID NO: 478023 - DNA, 61 bp, Homo sapiens; identical to SEQ ID NO: 455654
  chr12:49392537-49392598
  hyper
  sarcoma vs. anorectal,multiple_myeloma,head_and_neck, pancreas_gallbladder,cervical,upper_gi

SEQ ID NO: 478024 - DNA, 295 bp, Homo sapiens; identical to SEQ ID NO: 351347
  chr12:49392636-49392931
  hyper
  sarcoma vs. anorectal,multiple_myeloma,head_and_neck, pancreas_gallbladder,cervical,upper_gi

SEQ ID NO: 478025 - DNA, 156 bp, Homo sapiens
  chr12:49485561-49485717
  hyper
  sarcoma vs. melanoma,anorectal,bladder_and_urothelial, ovary,uterine,multiple_myeloma,myeloid_neoplasm,thyroid, prostate,non_cancer
cgccccaggcaccggctcccctccctccgcctgattcatcttttgtttcattgccttccctggcaccgggcatcgcttccttccttccttcctcctcctcctttgggcccttagcattaaccccttcgtgctctgggtgccccccagagaggtgcc

SEQ ID NO: 478026 - DNA, 273 bp, Homo sapiens
  chr12:49485914-49486187
  hyper
  sarcoma vs. melanoma,anorectal,bladder_and_urothelial, ovary,uterine,multiple_myeloma,myeloid_neoplasm,thyroid, prostate,non_cancer
aaagggcagaaagccgcgcccccaatccctgctccgtccgggtaggtcccctccccccgcgcgtccagtcttcccagttccagctaaggctctgccagtccggagagcccctatctctcccatctctgctctagatgcagcccagaagggcgtgggagtagcacctgagaataacggtctccttgtgcggatctggggagccccctgcagggtgagagcggagaagaggaaaagaagctgcggctggaagcctgcacctgggggagtgagacc

SEQ ID NO: 478027 - DNA, 300 bp, Homo sapiens; identical to SEQ ID NO: 334520
  chr12:50339307-50339607
  hyper
  sarcoma vs. renal

SEQ ID NO: 478028 - DNA, 122 bp, Homo sapiens; identical to SEQ ID NO: 455663
  chr12:54088960-54089082
  hyper
  sarcoma vs. thyroid,myeloid_neoplasm,uterine

SEQ ID NO: 478029 - DNA, 15 bp, Homo sapiens
  chr12:54089645-54089660
  hyper
  sarcoma vs. thyroid,myeloid_neoplasm,uterine
agcgagtttgggaac

SEQ ID NO: 478030 - DNA, 42 bp, Homo sapiens; identical to SEQ ID NO: 360094
  chr12:54132526-54132568
  hyper
  sarcoma vs. bladder_and_urothelial,upper_gi

SEQ ID NO: 478031 - DNA, 194 bp, Homo sapiens; identical to SEQ ID NO: 345427
  chr12:54150983-54151177
  hyper
  sarcoma vs. melanoma,liver_bileduct,lymphoid_neoplasm, renal,multiple_myeloma,pancreas_gallbladder,prostate, bladder_and_urothelial,non_cancer,colorectal,thyroid

SEQ ID NO: 478032 - DNA, 101 bp, Homo sapiens; identical to SEQ ID NO: 373032
  chr12:54330575-54330676
  hyper
  sarcoma vs. cervical

SEQ ID NO: 478033 - DNA, 65 bp, Homo sapiens; identical to SEQ ID NO: 455667
  chr12:54343505-54343570
  hyper
  sarcoma vs. colorectal

SEQ ID NO: 478034 - DNA, 333 bp, Homo sapiens; identical to SEQ ID NO: 334550
  chr12:54371976-54372309
  hyper
  sarcoma vs. colorectal,anorectal,uterine, multiple_myeloma,prostate,upper_gi,bladder_and_urothelial, pancreas_gallbladder,non_cancer,ovary,lymphoid_neoplasm, cervical

SEQ ID NO: 478035 - DNA, 321 bp, Homo sapiens; identical to SEQ ID NO: 468717
  chr12:54389321-54389642
  hyper
  sarcoma vs. upper_gi

SEQ ID NO: 478036 - DNA, 56 bp, Homo sapiens
  chr12:54391212-54391268
  hyper
  sarcoma vs. cervical,breast
cgagcaagtctcctgggaggggcaggagaggagccctcttccgcctttgtgtccag

SEQ ID NO: 478037 - DNA, 432 bp, Homo sapiens; identical to SEQ ID NO: 334559
  chr12:54400009-54400441
  hyper
  sarcoma vs. ovary,bladder_and_urothelial,prostate

SEQ ID NO: 478038 - DNA, 229 bp, Homo sapiens; identical to SEQ ID NO: 373053
  chr12:54404856-54405085
  hyper
  sarcoma vs. prostate

SEQ ID NO: 478039 - DNA, 28 bp, Homo sapiens
  chr12:54441393-54441421
  hyper
  sarcoma vs. myeloid_neoplasm,anorectal
aagcccaaggctgggggtcccgggttcg

SEQ ID NO: 478040 - DNA, 208 bp, Homo sapiens
  chr12:57635256-57635464
  hyper
cgcgcgcgcgcgcgctgagtagagtgggcagtggaggaggttggggtgccggttgtcttgtaccccagtaccggcccttcctcggatctgttttcaattcagtctgctccttggcccagacttatgacctttgcagcatgcggcagtatcatccatcacccaggcgccgtttagggggatggagggcgctgggagctcacatagggtc

SEQ ID NO: 478041 - DNA, 191 bp, Homo sapiens; identical to SEQ ID NO: 457443
  chr12:58015267-58015458
  hyper
  sarcoma vs. breast,renal,lung,liver_bileduct,prostate, anorectal,multiple_myeloma

SEQ ID NO: 478042 - DNA, 213 bp, Homo sapiens; identical to SEQ ID NO: 457444
  chr12:58015267-58015480
  hyper
  sarcoma vs. breast,anorectal,prostate,lung,renal, bladder_and_urothelial,uterine,multiple_myeloma

SEQ ID NO: 478043 - DNA, 189 bp, Homo sapiens; identical to SEQ ID NO: 351381
  chr12:58015548-58015737
  hyper
  sarcoma vs. breast,anorectal,prostate,lung,renal, bladder_and_urothelial,uterine,multiple_myeloma

SEQ ID NO: 478044 - DNA, 499 bp, Homo sapiens; identical to SEQ ID NO: 334595
  chr12:68041644-68042143
  hyper
  sarcoma vs. lung,breast,prostate,bladder_and_urothelial, ovary

SEQ ID NO: 478045 - DNA, 278 bp, Homo sapiens; identical to SEQ ID NO: 457447
  chr12:68758776-68759054
  hyper
  sarcoma vs. multiple_myeloma,renal

SEQ ID NO: 478046 - DNA, 108 bp, Homo sapiens; identical to SEQ ID NO: 360150
  chr12:68759131-68759239
  hyper
  sarcoma vs. multiple_myeloma,renal

SEQ ID NO: 478047 - DNA, 90 bp, Homo sapiens; identical to SEQ ID NO: 334598
  chr12:70759026-70759116
  hyper
  sarcoma vs. bladder_and_urothelial,breast

SEQ ID NO: 478048 - DNA, 489 bp, Homo sapiens
  chr12:71834301-71834790
  hyper
  sarcoma vs. breast,colorectal,cervical, bladder_and_urothelial,pancreas_gallbladder,renal,ovary, upper_gi
cgggaaagcgctgctgcgccgcagcttcccagtccagcgctagaaacatcgcagggcgaattcctgcaaatgcaggcatttgcgtgcggagtggacatttgtgacccagagcctggtacccaaaggcaggctgccatctggtccccgccccaaccgcctctctgcgtctagtcgcattccacgaaaagatggtctgtagaaagtttccccaaaggagaaacaacttgcccagctccaaagggtttttagtctgcatcccttgcactgtgacgtgatgtaacctttttggggttttttcctcttttcctcccttccttcctcccttcttccttccttccctccctcctttctttttattttctttcttttttaacggcgtgattaaaatgtggcaaccacaaaccccgattagagctgccagaacgttatctttacctttggctgcccgcgccgccctttgaagtgcccgcggccgctgtgtaatcttta

SEQ ID NO: 478049 - DNA, 393 bp, Homo sapiens; identical to SEQ ID NO: 334614
  chr12:90101352-90101745
  hyper
  sarcoma vs. lymphoid_neoplasm,ovary, bladder_and_urothelial,uterine

SEQ ID NO: 478050 - DNA, 74 bp, Homo sapiens; identical to SEQ ID NO: 468724
  chr12:96184964-96185038
  hyper
  sarcoma vs. cervical,uterine

SEQ ID NO: 478051 - DNA, 222 bp, Homo sapiens; identical to SEQ ID NO: 360178
  chr12:96185121-96185343
  hyper
  sarcoma vs. cervical,uterine

SEQ ID NO: 478052 - DNA, 647 bp, Homo sapiens; identical to SEQ ID NO: 476753
  chr12:99287504-99288151
  hyper

SEQ ID NO: 478053 - DNA, 110 bp, Homo sapiens; identical to SEQ ID NO: 334626
  chr12:102878329-102878439
  hyper
  sarcoma vs. melanoma

SEQ ID NO: 478054 - DNA, 456 bp, Homo sapiens; identical to SEQ ID NO: 334632
  chr12:104235228-104235684
  hyper
  sarcoma vs. melanoma

SEQ ID NO: 478055 - DNA, 179 bp, Homo sapiens
  chr12:109162554-109162733
  hyper
  sarcoma vs. colorectal,upper_gi
cggtacacgacggggcgtcgcgcctccagggctaggccgggcggatggagggggtccccggagcccgggggaagtggcgcagtgggcgtctgcatcggcccgaaggcacttgcgcagaggtccggcaggcagcagagcaccttgtgggcgtggtcgctggaggcagcgcctggcacccc

SEQ ID NO: 478056 - DNA, 57 bp, Homo sapiens; identical to SEQ ID NO: 360197
  chr12:109162762-109162819
  hyper
  sarcoma vs. colorectal,upper_gi

SEQ ID NO: 478057 - DNA, 185 bp, Homo sapiens; identical to SEQ ID NO: 334680
  chr12:122214111-122214296
  hyper
  sarcoma vs. lymphoid_neoplasm

SEQ ID NO: 478058 - DNA, 551 bp, Homo sapiens; identical to SEQ ID NO: 334686
  chr12:123258823-123259374
  hyper
  sarcoma vs. breast,bladder_and_urothelial,lung, head_and_neck,colorectal,multiple_myeloma,pancreas_gallbladder, anorectal,upper_gi,uterine,prostate

SEQ ID NO: 478059 - DNA, 173 bp, Homo sapiens; identical to SEQ ID NO: 334693
  chr12:125093646-125093819
  hyper
  sarcoma vs. head_and_neck,lung,anorectal, multiple_myeloma,ovary,prostate,breast,upper_gi,colorectal, pancreas_gallbladder,myeloid_neoplasm,bladder_and_urothelial, thyroid,uterine,renal,cervical,non_cancer,liver_bileduct,
  CONT. FROM ABOVE: lymphoid_neoplasm

SEQ ID NO: 478060 - DNA, 133 bp, Homo sapiens; identical to SEQ ID NO: 334694
  chr12:125477548-125477681
  hyper
  sarcoma vs. head_and_neck,liver_bileduct,lung,ovary, upper_gi,pancreas_gallbladder,anorectal,renal, bladder_and_urothelial,breast,uterine,prostate,colorectal, cervical,multiple_myeloma,lymphoid_neoplasm,non_cancer

SEQ ID NO: 478061 - DNA, 168 bp, Homo sapiens; identical to SEQ ID NO: 462415
  chr13:20735265-20735433
  hyper
  sarcoma vs. uterine,head_and_neck,ovary,cervical

SEQ ID NO: 478062 - DNA, 178 bp, Homo sapiens; identical to SEQ ID NO: 468743
  chr13:33000891-33001069
  hyper
  sarcoma vs. anorectal

SEQ ID NO: 478063 - DNA, 204 bp, Homo sapiens; identical to SEQ ID NO: 351462
  chr13:33001228-33001432
  hyper
  sarcoma vs. anorectal

SEQ ID NO: 478064 - DNA, 73 bp, Homo sapiens; identical to SEQ ID NO: 334754
  chr13:39610527-39610600
  hyper
  sarcoma vs. lung,head_and_neck,lymphoid_neoplasm, bladder_and_urothelial

SEQ ID NO: 478065 - DNA, 334 bp, Homo sapiens; identical to SEQ ID NO: 351467
  chr13:39610814-39611148
  hyper
  sarcoma vs. lung,lymphoid_neoplasm,upper_gi, head_and_neck,liver_bileduct,pancreas_gallbladder,breast, cervical,uterine,colorectal,ovary,multiple_myeloma

SEQ ID NO: 478066 - DNA, 26 bp, Homo sapiens
  chr13:41241723-41241749
  hyper
  sarcoma vs. bladder_and_urothelial,upper_gi,ovary, cervical,colorectal,pancreas_gallbladder
gggccggcagcgaagggctcaggagc

SEQ ID NO: 478067 - DNA, 129 bp, Homo sapiens; identical to SEQ ID NO: 351508
  chr13:113547249-113547378
  hyper
  sarcoma vs. liver_bileduct

SEQ ID NO: 478068 - DNA, 108 bp, Homo sapiens; identical to SEQ ID NO: 360374
  chr14:24550913-24551021
  hyper
  sarcoma vs. ovary,pancreas_gallbladder,lung

SEQ ID NO: 478069 - DNA, 207 bp, Homo sapiens; identical to SEQ ID NO: 351526
  chr14:25148242-25148449
  hyper
  sarcoma vs. melanoma,lymphoid_neoplasm,upper_gi,uterine

SEQ ID NO: 478070 - DNA, 49 bp, Homo sapiens
  chr14:36979694-36979743
  hyper
  sarcoma vs. thyroid,myeloid_neoplasm,non_cancer
cgaggttcgctttacacataggcatatccagttccttagacattgactg

SEQ ID NO: 478071 - DNA, 48 bp, Homo sapiens; identical to SEQ ID NO: 360393
  chr14:36979809-36979857
  hyper
  sarcoma vs. thyroid,myeloid_neoplasm,non_cancer

SEQ ID NO: 478072 - DNA, 105 bp, Homo sapiens; identical to SEQ ID NO: 473754
  chr14:38057019-38057124
  hyper
  sarcoma vs. renal

SEQ ID NO: 478073 - DNA, 20 bp, Homo sapiens
  chr14:38057372-38057392
  hyper
  sarcoma vs. renal
gcccgggtgtttgtgtgtcc

SEQ ID NO: 478074 - DNA, 300 bp, Homo sapiens; identical to SEQ ID NO: 473756
  chr14:38057503-38057803
  hyper
  sarcoma vs. renal

SEQ ID NO: 478075 - DNA, 155 bp, Homo sapiens; identical to SEQ ID NO: 351542
  chr14:38057832-38057987
  hyper
  sarcoma vs. renal

SEQ ID NO: 478076 - DNA, 53 bp, Homo sapiens; identical to SEQ ID NO: 455691
  chr14:38725469-38725522
  hyper
  sarcoma vs. myeloid_neoplasm

SEQ ID NO: 478077 - DNA, 315 bp, Homo sapiens; identical to SEQ ID NO: 452872
  chr14:52781114-52781429
  hyper
  sarcoma vs. myeloid_neoplasm,upper_gi,non_cancer,renal, pancreas_gallbladder,uterine,thyroid

SEQ ID NO: 478078 - DNA, 24 bp, Homo sapiens
  chr14:52781405-52781429
  hyper
  sarcoma vs. myeloid_neoplasm,non_cancer,thyroid,upper_gi, uterine,pancreas_gallbladder
cgcgccgctggcggggggacgtgg

SEQ ID NO: 478079 - DNA, 27 bp, Homo sapiens
  chr14:52781982-52782009
  hyper
  sarcoma vs. myeloid_neoplasm,non_cancer,thyroid,upper_gi, uterine,pancreas_gallbladder
cagtggccggggcggccccggggcccg

SEQ ID NO: 478080 - DNA, 80 bp, Homo sapiens; identical to SEQ ID NO: 452875
  chr14:52782046-52782126
  hyper
  sarcoma vs. myeloid_neoplasm,non_cancer,thyroid,upper_gi, uterine,pancreas_gallbladder

SEQ ID NO: 478081 - DNA, 17 bp, Homo sapiens
  chr14:52782173-52782190
  hyper
  sarcoma vs. myeloid_neoplasm,non_cancer,thyroid,upper_gi, uterine,pancreas_gallbladder
cctccaccctttccacc

SEQ ID NO: 478082 - DNA, 214 bp, Homo sapiens; identical to SEQ ID NO: 334917
  chr14:58862962-58863176
  hyper
  sarcoma vs. liver_bileduct,cervical

SEQ ID NO: 478083 - DNA, 173 bp, Homo sapiens; identical to SEQ ID NO: 351562
  chr14:60043607-60043780
  hyper
  sarcoma vs. thyroid,non_cancer,myeloid_neoplasm, multiple_myeloma,colorectal,renal,anorectal

SEQ ID NO: 478084 - DNA, 45 bp, Homo sapiens; identical to SEQ ID NO: 452880
  chr14:60798413-60798458
  hyper
  sarcoma vs. lymphoid_neoplasm,renal,upper_gi, myeloid_neoplasm

SEQ ID NO: 478085 - DNA, 134 bp, Homo sapiens; identical to SEQ ID NO: 351568
  chr14:60982999-60983133
  hyper
  sarcoma vs. myeloid_neoplasm,non_cancer

SEQ ID NO: 478086 - DNA, 167 bp, Homo sapiens; identical to SEQ ID NO: 345459
  chr14:61104864-61105031
  hyper
  sarcoma vs. myeloid_neoplasm,non_cancer

SEQ ID NO: 478087 - DNA, 133 bp, Homo sapiens; identical to SEQ ID NO: 460719
  chr14:61116736-61116869
  hyper
  sarcoma vs. upper_gi

SEQ ID NO: 478088 - DNA, 186 bp, Homo sapiens; identical to SEQ ID NO: 351573
  chr14:61117028-61117214
  hyper
  sarcoma vs. upper_gi

SEQ ID NO: 478089 - DNA, 355 bp, Homo sapiens; identical to SEQ ID NO: 468763
  chr14:61123186-61123541
  hyper
  sarcoma vs. cervical,uterine,prostate,breast

SEQ ID NO: 478090 - DNA, 460 bp, Homo sapiens; identical to SEQ ID NO: 468764
  chr14:61123681-61124141
  hyper
  sarcoma vs. cervical,uterine,prostate,breast

SEQ ID NO: 478091 - DNA, 92 bp, Homo sapiens; identical to SEQ ID NO: 347308
  chr14:65016816-65016908
  hyper
  sarcoma vs. colorectal,thyroid,cervical, bladder_and_urothelial,uterine,multiple_myeloma,upper_gi, non_cancer,ovary,pancreas_gallbladder,myeloid_neoplasm, anorectal,breast

SEQ ID NO: 478092 - DNA, 93 bp, Homo sapiens; identical to SEQ ID NO: 334951
  chr14:66869973-66870066
  hyper
  sarcoma vs. renal,melanoma,pancreas_gallbladder

SEQ ID NO: 478093 - DNA, 50 bp, Homo sapiens; identical to SEQ ID NO: 462458
  chr14:74208160-74208210
  hyper
  sarcoma vs. anorectal

SEQ ID NO: 478094 - DNA, 26 bp, Homo sapiens
  chr14:74208319-74208345
  hyper
  sarcoma vs. anorectal
accaggaatgcccctcccaggctatc

SEQ ID NO: 478095 - DNA, 98 bp, Homo sapiens; identical to SEQ ID NO: 334967
  chr14:74238704-74238802
  hyper
  sarcoma vs. anorectal

SEQ ID NO: 478096 - DNA, 9 bp, Homo sapiens
  chr14:76597648-76597657
  hyper
  sarcoma vs. liver_bileduct,anorectal,breast,ovary,renal, prostate,multiple_myeloma,uterine,non_cancer,myeloid_neoplasm, thyroid,bladder_and_urothelial,upper_gi
cgcttgccc

SEQ ID NO: 478097 - DNA, 168 bp, Homo sapiens; identical to SEQ ID NO: 347313
  chr14:76597725-76597893
  hyper
  sarcoma vs. liver_bileduct,anorectal,breast,ovary,renal, prostate,multiple_myeloma,uterine,non_cancer,myeloid_neoplasm, thyroid,bladder_and_urothelial,upper_gi

SEQ ID NO: 478098 - DNA, 123 bp, Homo sapiens; identical to SEQ ID NO: 334974
  chr14:76603110-76603233
  hyper
  sarcoma vs. upper_gi,head_and_neck,ovary,prostate, bladder_and_urothelial,pancreas_gallbladder,uterine

SEQ ID NO: 478099 - DNA, 551 bp, Homo sapiens; identical to SEQ ID NO: 335000
  chr14:92302201-92302752
  hyper
  sarcoma vs. upper_gi,head_and_neck,lung,cervical,breast, colorectal,bladder_and_urothelial,thyroid

SEQ ID NO: 478100 - DNA, 182 bp, Homo sapiens; identical to SEQ ID NO: 345461
  chr14:94406037-94406219
  hyper
  sarcoma vs. renal,multiple_myeloma,prostate,breast, non_cancer,myeloid_neoplasm,thyroid,uterine,ovary, pancreas_gallbladder

SEQ ID NO: 478101 - DNA, 47 bp, Homo sapiens
  chr14:95240181-95240228
  hyper
  sarcoma vs. renal
cggatttttcgtgtcatgtgcaaaaagccggtgtgtccttttcaagg

SEQ ID NO: 478102 - DNA, 120 bp, Homo sapiens; identical to SEQ ID NO: 335011
  chr14:95240610-95240730
  hyper
  sarcoma vs. bladder_and_urothelial

SEQ ID NO: 478103 - DNA, 198 bp, Homo sapiens; identical to SEQ ID NO: 345462
  chr14:105189960-105190158
  hyper
  sarcoma vs. melanoma,breast,pancreas_gallbladder,lung, head_and_neck,bladder_and_urothelial,cervical,colorectal, prostate,upper_gi,multiple_myeloma,anorectal,uterine,ovary, non_cancer,lymphoid_neoplasm,renal,myeloid_neoplasm,thyroid,
  CONT. FROM ABOVE: liver_bileduct

SEQ ID NO: 478104 - DNA, 667 bp, Homo sapiens; identical to SEQ ID NO: 351634
  chr14:105293560-105294227
  hyper
  sarcoma vs. ovary,renal,prostate

SEQ ID NO: 478105 - DNA, 465 bp, Homo sapiens; identical to SEQ ID NO: 468778
  chr14:105330476-105330941
  hyper
  sarcoma vs. ovary,lung,head_and_neck,anorectal, pancreas_gallbladder,breast,liver_bileduct,colorectal

SEQ ID NO: 478106 - DNA, 455 bp, Homo sapiens; identical to SEQ ID NO: 351636
  chr14:105330980-105331435
  hyper
  sarcoma vs. ovary,lung,head_and_neck,anorectal, pancreas_gallbladder,breast,liver_bileduct,colorectal

SEQ ID NO: 478107 - DNA, 339 bp, Homo sapiens; identical to SEQ ID NO: 345465
  chr15:31621317-31621656
  hyper
  sarcoma vs. head_and_neck,liver_bileduct,ovary, pancreas_gallbladder,lung,renal,upper_gi,lymphoid_neoplasm, colorectal,bladder_and_urothelial,breast,cervical,uterine, multiple_myeloma

SEQ ID NO: 478108 - DNA, 95 bp, Homo sapiens
  chr15:37174944-37175039
  hyper
  sarcoma vs. melanoma
cgttccgcggtgtagattgacactcgttatgtgggggtctggttgcggttggaagacttatccgagtcagggctgcattgccagcgcctttccca

SEQ ID NO: 478109 - DNA, 240 bp, Homo sapiens; identical to SEQ ID NO: 360594
  chr15:37175296-37175536
  hyper
  sarcoma vs. melanoma

SEQ ID NO: 478110 - DNA, 111 bp, Homo sapiens; identical to SEQ ID NO: 335080
  chr15:38857279-38857390
  hyper
  sarcoma vs. lymphoid_neoplasm,bladder_and_urothelial, lung,anorectal,multiple_myeloma,uterine

SEQ ID NO: 478111 - DNA, 162 bp, Homo sapiens; identical to SEQ ID NO: 462468
  chr15:40575352-40575514
  hyper
  sarcoma vs. cervical,anorectal

SEQ ID NO: 478112 - DNA, 417 bp, Homo sapiens; identical to SEQ ID NO: 468786
  chr15:41136701-41137118
  hyper
  sarcoma vs. lung

SEQ ID NO: 478113 - DNA, 44 bp, Homo sapiens; identical to SEQ ID NO: 203840
  chr15:41137147-41137191
  hyper
  sarcoma vs. lung

SEQ ID NO: 478114 - DNA, 385 bp, Homo sapiens; identical to SEQ ID NO: 460730
  chr15:41786420-41786805
  hyper
  sarcoma vs. myeloid_neoplasm,thyroid,non_cancer,upper_gi, colorectal,anorectal,pancreas_gallbladder, bladder_and_urothelial,renal,cervical

SEQ ID NO: 478115 - DNA, 28 bp, Homo sapiens
  chr15:41788111-41788139
  hyper
  sarcoma vs. colorectal,non_cancer
gcccaagcctgggtgtagagaccgcccc

SEQ ID NO: 478116 - DNA, 43 bp, Homo sapiens; identical to SEQ ID NO: 351664
  chr15:41788242-41788285
  hyper
  sarcoma vs. colorectal,non_cancer

SEQ ID NO: 478117 - DNA, 447 bp, Homo sapiens; identical to SEQ ID NO: 335091
  chr15:42873450-42873897
  hyper
  sarcoma vs. pancreas_gallbladder,uterine,lung, head_and_neck,breast

SEQ ID NO: 478118 - DNA, 258 bp, Homo sapiens
  chr15:43803503-43803761
  hyper
  sarcoma vs. renal
cgtctgcatctccatccctagtgtgcacttcctgagatctgcgcccttgtcacctgcatcttccatgccatgtgtccgtatcctctcgctctactaacatctcgcttgcccatccttactgcacactccatggcgttccgcagtctccctgaggcagcggagctctatgcagcccctggggcccctctggtcacaccctccaccgcagtgttttggaccaggtgtcctgaaagtcctcaccatccctggagaatccac

SEQ ID NO: 478119 - DNA, 133 bp, Homo sapiens; identical to SEQ ID NO: 360618
  chr15:43803825-43803958
  hyper
  sarcoma vs. renal

SEQ ID NO: 478120 - DNA, 379 bp, Homo sapiens; identical to SEQ ID NO: 360648
  chr15:57598802-57599181
  hyper
  sarcoma vs. liver_bileduct,melanoma

SEQ ID NO: 478121 - DNA, 340 bp, Homo sapiens; identical to SEQ ID NO: 373676
  chr15:60298179-60298519
  hyper
  sarcoma vs. melanoma

SEQ ID NO: 478122 - DNA, 782 bp, Homo sapiens; identical to SEQ ID NO: 351688
  chr15:60884567-60885349
  hyper
  sarcoma vs. ovary,cervical,head_and_neck, pancreas_gallbladder,uterine,renal

SEQ ID NO: 478123 - DNA, 97 bp, Homo sapiens; identical to SEQ ID NO: 351690
  chr15:62359006-62359103
  hyper
  sarcoma vs. lung,head_and_neck

SEQ ID NO: 478124 - DNA, 380 bp, Homo sapiens; identical to SEQ ID NO: 468802
  chr15:62359105-62359485
  hyper
  sarcoma vs. lung,head_and_neck

SEQ ID NO: 478125 - DNA, 34 bp, Homo sapiens; identical to SEQ ID NO: 347345
  chr15:63779725-63779759
  hyper
  sarcoma vs. renal,prostate,uterine,colorectal,thyroid, non_cancer,pancreas_gallbladder,lymphoid_neoplasm

SEQ ID NO: 478126 - DNA, 195 bp, Homo sapiens; identical to SEQ ID NO: 471044
  chr15:67357339-67357534
  hyper
  sarcoma vs. upper_gi,breast,colorectal, pancreas_gallbladder,cervical,bladder_and_urothelial,renal,lung, ovary,anorectal,liver_bileduct,uterine

SEQ ID NO: 478127 - DNA, 189 bp, Homo sapiens; identical to SEQ ID NO: 351703
  chr15:67357544-67357733
  hyper
  sarcoma vs. upper_gi,breast,colorectal, pancreas_gallbladder,cervical,bladder_and_urothelial,renal,lung, ovary,anorectal,liver_bileduct,uterine

SEQ ID NO: 478128 - DNA, 41 bp, Homo sapiens; identical to SEQ ID NO: 464232
  chr15:68125183-68125224
  hyper
  sarcoma vs. thyroid,myeloid_neoplasm,multiple_myeloma, non_cancer,renal

SEQ ID NO: 478129 - DNA, 287 bp, Homo sapiens; identical to SEQ ID NO: 335155
  chr15:68347714-68348001
  hyper
  sarcoma vs. lymphoid_neoplasm,ovary,renal

SEQ ID NO: 478130 - DNA, 202 bp, Homo sapiens; identical to SEQ ID NO: 335157
  chr15:68821338-68821540
  hyper
  sarcoma vs. bladder_and_urothelial,multiple_myeloma, anorectal,upper_gi,head_and_neck

SEQ ID NO: 478131 - DNA, 263 bp, Homo sapiens; identical to SEQ ID NO: 335159
  chr15:69114222-69114485
  hyper
  sarcoma vs. lung,head_and_neck,ovary,upper_gi,cervical, uterine,breast,colorectal,prostate,liver_bileduct, lymphoid_neoplasm,bladder_and_urothelial,renal, pancreas_gallbladder,myeloid_neoplasm,anorectal,thyroid,
  CONT. FROM ABOVE: non_cancer,multiple_myeloma

SEQ ID NO: 478132 - DNA, 457 bp, Homo sapiens; identical to SEQ ID NO: 335177
  chr15:75075794-75076251
  hyper
  sarcoma vs. lymphoid_neoplasm,breast,anorectal

SEQ ID NO: 478133 - DNA, 191 bp, Homo sapiens; identical to SEQ ID NO: 335181
  chr15:75976190-75976381
  hyper
  sarcoma vs. lymphoid_neoplasm,lung,upper_gi, bladder_and_urothelial,renal,pancreas_gallbladder,uterine, multiple_myeloma,ovary,liver_bileduct,anorectal,colorectal, breast,cervical

SEQ ID NO: 478134 - DNA, 128 bp, Homo sapiens; identical to SEQ ID NO: 335195
  chr15:80352864-80352992
  hyper
  sarcoma vs. lung,melanoma,head_and_neck, lymphoid_neoplasm,pancreas_gallbladder,breast,upper_gi,ovary, bladder_and_urothelial

SEQ ID NO: 478135 - DNA, 195 bp, Homo sapiens; identical to SEQ ID NO: 462486
  chr15:82339684-82339879
  hyper
  sarcoma vs. ovary

SEQ ID NO: 478136 - DNA, 7 bp, Homo sapiens
  chr15:82340207-82340214
  hyper
  sarcoma vs. ovary
cttcacc

SEQ ID NO: 478137 - DNA, 68 bp, Homo sapiens; identical to SEQ ID NO: 360734
  chr15:89913879-89913947
  hyper
  sarcoma vs. multiple_myeloma,colorectal, pancreas_gallbladder,anorectal

SEQ ID NO: 478138 - DNA, 295 bp, Homo sapiens; identical to SEQ ID NO: 457572
  chr15:89949942-89950237
  hyper
  sarcoma vs. thyroid,liver_bileduct

SEQ ID NO: 478139 - DNA, 178 bp, Homo sapiens
  chr15:96959372-96959550
  hyper
  sarcoma vs. melanoma
aggggcctttcctcttgtcgctctcgctttattacattagcgcgggcttccccgcgccggcgtgggctcagaagccgaggcgccgggtcacccatgacaaatgtccccgtgtctcgccaacaggccccgcctggccctgccactccatctgcccaacaggaccccggagagtgcttgc

SEQ ID NO: 478140 - DNA, 25 bp, Homo sapiens
  chr15:96960189-96960214
  hyper
  sarcoma vs. melanoma
cgtcaacacctcgagctgccccggc

SEQ ID NO: 478141 - DNA, 177 bp, Homo sapiens
  chr15:99193738-99193915
  hyper
  sarcoma vs. anorectal
cgggccgggggatggaggggtactagggccgcatccgagtgtgcgttggtgggtgtgtggtcggagccgacgtgcattccgacacacgtgctcgcagcgcggggtgtagtcgccgcctcacggggacacctagacgcccgtccctggcgagaggtgtcgtacgctgtggtttcagcg

SEQ ID NO: 478142 - DNA, 372 bp, Homo sapiens; identical to SEQ ID NO: 373800
  chr15:99194186-99194558
  hyper
  sarcoma vs. anorectal

SEQ ID NO: 478143 - DNA, 7 bp, Homo sapiens
  chr16:3078144-3078151
  hyper
  sarcoma vs. prostate,colorectal,bladder_and_urothelial, renal,multiple_myeloma,anorectal,lung,uterine, pancreas_gallbladder,lymphoid_neoplasm
cgggccc

SEQ ID NO: 478144 - DNA, 103 bp, Homo sapiens; identical to SEQ ID NO: 455724
  chr16:3078252-3078355
  hyper
  sarcoma vs. prostate,colorectal,bladder_and_urothelial, renal,multiple_myeloma,anorectal,lung,uterine, pancreas_gallbladder,lymphoid_neoplasm

SEQ ID NO: 478145 - DNA, 335 bp, Homo sapiens; identical to SEQ ID NO: 351770
  chr16:3078384-3078719
  hyper
  sarcoma vs. prostate,colorectal,bladder_and_urothelial, renal,multiple_myeloma,anorectal,lung,uterine, pancreas_gallbladder,lymphoid_neoplasm

SEQ ID NO: 478146 - DNA, 543 bp, Homo sapiens; identical to SEQ ID NO: 345486
  chr16:4233245-4233788
  hyper
  sarcoma vs. ovary,upper_gi,melanoma,breast, pancreas_gallbladder,lung,head_and_neck,renal,uterine, colorectal,cervical,anorectal,bladder_and_urothelial,prostate, non_cancer,liver_bileduct,lymphoid_neoplasm,myeloid_neoplasm,
  CONT. FROM ABOVE: thyroid

SEQ ID NO: 478147 - DNA, 49 bp, Homo sapiens; identical to SEQ ID NO: 452915
  chr16:4363872-4363921
  hyper
  sarcoma vs. liver_bileduct,colorectal,multiple_myeloma, pancreas_gallbladder,uterine,renal,upper_gi,prostate,non_cancer, myeloid_neoplasm,thyroid

SEQ ID NO: 478148 - DNA, 158 bp, Homo sapiens; identical to SEQ ID NO: 345488
  chr16:4364080-4364238
  hyper
  sarcoma vs. liver_bileduct,colorectal,multiple_myeloma, pancreas_gallbladder,uterine,renal,upper_gi,prostate,non_cancer, myeloid_neoplasm,thyroid

SEQ ID NO: 478149 - DNA, 890 bp, Homo sapiens; identical to SEQ ID NO: 345489
  chr16:4986642-4987532
  hyper
  sarcoma vs. liver_bileduct,ovary,lung,uterine, head_and_neck,upper_gi,pancreas_gallbladder,breast,prostate, cervical,colorectal,anorectal,renal,thyroid,non_cancer, myeloid_neoplasm,bladder_and_urothelial,multiple_myeloma

SEQ ID NO: 478150 - DNA, 173 bp, Homo sapiens; identical to SEQ ID NO: 335284
  chr16:9056313-9056486
  hyper
  sarcoma vs. lymphoid_neoplasm,lung,head_and_neck, liver_bileduct,pancreas_gallbladder,upper_gi,breast

SEQ ID NO: 478151 - DNA, 16 bp, Homo sapiens
  chr16:10479686-10479702
  hyper
  sarcoma vs. bladder_and_urothelial,lymphoid_neoplasm, ovary,upper_gi,pancreas_gallbladder
cgctatggcgggtaag

SEQ ID NO: 478152 - DNA, 17 bp, Homo sapiens
  chr16:10480336-10480353
  hyper
  sarcoma vs. bladder_and_urothelial,lymphoid_neoplasm, ovary,upper_gi,pancreas_gallbladder
tgctttcagaaattaac

SEQ ID NO: 478153 - DNA, 430 bp, Homo sapiens; identical to SEQ ID NO: 452918
  chr16:12897365-12897795
  hyper
  sarcoma vs. ovary,melanoma,prostate,lung

SEQ ID NO: 478154 - DNA, 37 bp, Homo sapiens; identical to SEQ ID NO: 335294
  chr16:14164836-14164873
  hyper
  sarcoma vs. liver_bileduct

SEQ ID NO: 478155 - DNA, 397 bp, Homo sapiens; identical to SEQ ID NO: 351796
  chr16:31712178-31712575
  hyper
  sarcoma vs. liver_bileduct,pancreas_gallbladder, lymphoid_neoplasm

SEQ ID NO: 478156 - DNA, 107 bp, Homo sapiens; identical to SEQ ID NO: 454210
  chr16:54966659-54966766
  hyper
  sarcoma vs. anorectal

SEQ ID NO: 478157 - DNA, 8 bp, Homo sapiens
  chr16:54967414-54967422
  hyper
  sarcoma vs. anorectal
cgtgtccc

SEQ ID NO: 478158 - DNA, 218 bp, Homo sapiens; identical to SEQ ID NO: 360841
  chr16:56691542-56691760
  hyper
  sarcoma vs. uterine,pancreas_gallbladder,cervical, colorectal,anorectal,breast,lung,upper_gi

SEQ ID NO: 478159 - DNA, 271 bp, Homo sapiens; identical to SEQ ID NO: 454215
  chr16:67198282-67198553
  hyper
  sarcoma vs. melanoma

SEQ ID NO: 478160 - DNA, 271 bp, Homo sapiens; identical to SEQ ID NO: 454215
  chr16:67198282-67198553
  hyper
  sarcoma vs. non_cancer,anorectal,thyroid,renal, myeloid_neoplasm,cervical

SEQ ID NO: 478161 - DNA, 60 bp, Homo sapiens; identical to SEQ ID NO: 464263
  chr16:67199532-67199592
  hyper
  sarcoma vs. anorectal,thyroid,non_cancer

SEQ ID NO: 478162 - DNA, 256 bp, Homo sapiens; identical to SEQ ID NO: 455742
  chr16:67678786-67679042
  hyper
  sarcoma vs. lymphoid_neoplasm

SEQ ID NO: 478163 - DNA, 50 bp, Homo sapiens; identical to SEQ ID NO: 351831
  chr16:73100590-73100640
  hyper
  sarcoma vs. multiple_myeloma,anorectal,thyroid, colorectal,non_cancer,breast

SEQ ID NO: 478164 - DNA, 729 bp, Homo sapiens; identical to SEQ ID NO: 335384
  chr16:77756212-77756941
  hyper
  sarcoma vs. liver_bileduct

SEQ ID NO: 478165 - DNA, 246 bp, Homo sapiens; identical to SEQ ID NO: 466588
  chr16:86531701-86531947
  hyper
  sarcoma vs. melanoma,anorectal

SEQ ID NO: 478166 - DNA, 83 bp, Homo sapiens; identical to SEQ ID NO: 335413
  chr16:88292860-88292943
  hyper
  sarcoma vs. colorectal,uterine,bladder_and_urothelial, upper_gi,breast,prostate,cervical,head_and_neck,lung,anorectal

SEQ ID NO: 478167 - DNA, 32 bp, Homo sapiens; identical to SEQ ID NO: 360918
  chr16:89985145-89985177
  hyper
  sarcoma vs. melanoma

SEQ ID NO: 478168 - DNA, 159 bp, Homo sapiens; identical to SEQ ID NO: 460767
  chr17:1901335-1901494
  hyper
  sarcoma vs. liver_bileduct

SEQ ID NO: 478169 - DNA, 100 bp, Homo sapiens; identical to SEQ ID NO: 351869
  chr17:1901970-1902070
  hyper
  sarcoma vs. liver_bileduct

SEQ ID NO: 478170 - DNA, 328 bp, Homo sapiens; identical to SEQ ID NO: 360927
  chr17:1954658-1954986
  hyper
  sarcoma vs. bladder_and_urothelial

SEQ ID NO: 478171 - DNA, 409 bp, Homo sapiens; identical to SEQ ID NO: 335445
  chr17:6939640-6940049
  hyper
  sarcoma vs. lung

SEQ ID NO: 478172 - DNA, 70 bp, Homo sapiens; identical to SEQ ID NO: 335447
  chr17:7198346-7198416
  hyper
  sarcoma vs. breast,anorectal,upper_gi,prostate, multiple_myeloma,lung,pancreas_gallbladder,colorectal

SEQ ID NO: 478173 - DNA, 107 bp, Homo sapiens; identical to SEQ ID NO: 335458
  chr17:8901441-8901548
  hyper
  sarcoma vs. melanoma,lymphoid_neoplasm,upper_gi, colorectal,bladder_and_urothelial,pancreas_gallbladder,renal, liver_bileduct,breast,prostate

SEQ ID NO: 478174 - DNA, 267 bp, Homo sapiens; identical to SEQ ID NO: 466607
  chr17:15244586-15244853
  hyper
  sarcoma vs. ovary

SEQ ID NO: 478175 - DNA, 49 bp, Homo sapiens; identical to SEQ ID NO: 472535
  chr17:16283879-16283928
  hyper
  sarcoma vs. liver_bileduct

SEQ ID NO: 478176 - DNA, 675 bp, Homo sapiens; identical to SEQ ID NO: 472536
  chr17:16283956-16284631
  hyper
  sarcoma vs. liver_bileduct

SEQ ID NO: 478177 - DNA, 389 bp, Homo sapiens; identical to SEQ ID NO: 472537
  chr17:16284242-16284631
  hyper
  sarcoma vs. lymphoid_neoplasm,liver_bileduct,lung,renal, prostate,breast,cervical,upper_gi

SEQ ID NO: 478178 - DNA, 39 bp, Homo sapiens; identical to SEQ ID NO: 347411
  chr17:16285065-16285104
  hyper
  sarcoma vs. lymphoid_neoplasm,liver_bileduct,lung,renal, prostate,breast,cervical,upper_gi

SEQ ID NO: 478179 - DNA, 811 bp, Homo sapiens; identical to SEQ ID NO: 335480
  chr17:18907431-18908242
  hyper
  sarcoma vs. liver_bileduct,lung,ovary,upper_gi, head_and_neck,uterine,colorectal,pancreas_gallbladder, lymphoid_neoplasm

SEQ ID NO: 478180 - DNA, 146 bp, Homo sapiens
  chr17:26903726-26903872
  hyper
  sarcoma vs. cervical
cggagtcccaggtagcaggacgaggatggcaggggaagagccaaggaaatgaagcggagatgttgagtggctcccgccttgcctggccttacctgtgcgcagccagttagcagccgcagccacaagcacagctcgggttctgatcc

SEQ ID NO: 478181 - DNA, 218 bp, Homo sapiens; identical to SEQ ID NO: 360984
  chr17:26903937-26904155
  hyper
  sarcoma vs. cervical

SEQ ID NO: 478182 - DNA, 356 bp, Homo sapiens; identical to SEQ ID NO: 455755
  chr17:27038294-27038650
  hyper
  sarcoma vs. multiple_myeloma,anorectal,cervical, non_cancer,myeloid_neoplasm

SEQ ID NO: 478183 - DNA, 53 bp, Homo sapiens; identical to SEQ ID NO: 347416
  chr17:27940911-27940964
  hyper
  sarcoma vs. renal,thyroid

SEQ ID NO: 478184 - DNA, 165 bp, Homo sapiens; identical to SEQ ID NO: 335503
  chr17:31264142-31264307
  hyper
  sarcoma vs. liver_bileduct,upper_gi,pancreas_gallbladder

SEQ ID NO: 478185 - DNA, 585 bp, Homo sapiens; identical to SEQ ID NO: 351932
  chr17:37757285-37757870
  hyper
  sarcoma vs. multiple_myeloma,renal,thyroid

SEQ ID NO: 478186 - DNA, 122 bp, Homo sapiens; identical to SEQ ID NO: 455769
  chr17:37760007-37760129
  hyper
  sarcoma vs. bladder_and_urothelial,cervical, multiple_myeloma,anorectal,head_and_neck,non_cancer,thyroid, uterine

SEQ ID NO: 478187 - DNA, 297 bp, Homo sapiens; identical to SEQ ID NO: 335537
  chr17:38020387-38020684
  hyper
  sarcoma vs. lymphoid_neoplasm,bladder_and_urothelial

SEQ ID NO: 478188 - DNA, 280 bp, Homo sapiens; identical to SEQ ID NO: 466613
  chr17:39683530-39683810
  hyper
  sarcoma vs. pancreas_gallbladder,lung,cervical,anorectal, breast,ovary,colorectal,upper_gi

SEQ ID NO: 478189 - DNA, 487 bp, Homo sapiens; identical to SEQ ID NO: 466614
  chr17:39683839-39684326
  hyper
  sarcoma vs. pancreas_gallbladder,lung,cervical,anorectal, breast,ovary,colorectal,upper_gi

SEQ ID NO: 478190 - DNA, 85 bp, Homo sapiens; identical to SEQ ID NO: 457604
  chr17:40558083-40558168
  hyper
  sarcoma vs. lymphoid_neoplasm,prostate,colorectal, non_cancer,breast,multiple_myeloma,uterine,pancreas_gallbladder, myeloid_neoplasm,thyroid,liver_bileduct,renal,upper_gi,ovary, lung

SEQ ID NO: 478191 - DNA, 47 bp, Homo sapiens; identical to SEQ ID NO: 345518
  chr17:40558226-40558273
  hyper
  sarcoma vs. lymphoid_neoplasm,prostate,colorectal, non_cancer,breast,multiple_myeloma,uterine,pancreas_gallbladder, myeloid_neoplasm,thyroid,liver_bileduct,renal,upper_gi,ovary, lung

SEQ ID NO: 478192 - DNA, 118 bp, Homo sapiens
  chr17:44849684-44849802
  hyper
  sarcoma vs. breast,lung,cervical,head_and_neck,anorectal, uterine,colorectal,prostate,non_cancer,bladder_and_urothelial, upper_gi,pancreas_gallbladder,ovary,renal,myeloid_neoplasm, liver_bileduct,multiple_myeloma,thyroid
cggtggtgacttaaaacgttcaacgcggagtgaatgggtagcgctcccagagccgctttcccctggctcttggccggagacgggaagagcgatcagaggtgactcgcttttggggagc

SEQ ID NO: 478193 - DNA, 80 bp, Homo sapiens; identical to SEQ ID NO: 345524
  chr17:44849831-44849911
  hyper
  sarcoma vs. breast,lung,cervical,head_and_neck,anorectal, uterine,colorectal,prostate,non_cancer,bladder_and_urothelial, upper_gi,pancreas_gallbladder,ovary,renal,myeloid_neoplasm, liver_bileduct,multiple_myeloma,thyroid

SEQ ID NO: 478194 - DNA, 89 bp, Homo sapiens; identical to SEQ ID NO: 351969
  chr17:46675757-46675846
  hyper
  sarcoma vs. prostate,uterine

SEQ ID NO: 478195 - DNA, 371 bp, Homo sapiens; identical to SEQ ID NO: 335603
  chr17:47439801-47440172
  hyper
  sarcoma vs. lung

SEQ ID NO: 478196 - DNA, 96 bp, Homo sapiens
  chr17:48639236-48639332
  hyper
  sarcoma vs. anorectal
cgcgagcaggtctcgtcggtaacccgggcttaccccacctgcgtacacacacctcagtcttcctgggttgggggggtggggatccaggccaggaga

SEQ ID NO: 478197 - DNA, 30 bp, Homo sapiens
  chr17:48639832-48639862
  hyper
  sarcoma vs. anorectal
ccgcgggtgcctcctacccgatctccattc

SEQ ID NO: 478198 - DNA, 299 bp, Homo sapiens; identical to SEQ ID NO: 361105
  chr17:56405995-56406294
  hyper
  sarcoma vs. lymphoid_neoplasm

SEQ ID NO: 478199 - DNA, 12 bp, Homo sapiens
  chr17:58228061-58228073
  hyper
  sarcoma vs. ovary,bladder_and_urothelial,uterine, pancreas_gallbladder,prostate,renal,cervical,non_cancer,breast
cggacccgcctc

SEQ ID NO: 478200 - DNA, 85 bp, Homo sapiens; identical to SEQ ID NO: 347456
  chr17:58228397-58228482
  hyper
  sarcoma vs. ovary,bladder_and_urothelial,uterine, pancreas_gallbladder,prostate,renal,cervical,non_cancer,breast

SEQ ID NO: 478201 - DNA, 86 bp, Homo sapiens
  chr17:59475272-59475358
  hyper
  sarcoma vs. anorectal,myeloid_neoplasm
cgcgcgcgcgcgactttgcgaatgtattcacggattcctaggccggtacctgggttcccggctaaggaaagctgccctggttatta

SEQ ID NO: 478202 - DNA, 15 bp, Homo sapiens
  chr17:59532358-59532373
  hyper
  sarcoma vs. multiple_myeloma
actcctaggtttccg

SEQ ID NO: 478203 - DNA, 132 bp, Homo sapiens; identical to SEQ ID NO: 455793
  chr17:59532387-59532519
  hyper
  sarcoma vs. multiple_myeloma

SEQ ID NO: 478204 - DNA, 1 bp, Homo sapiens
  chr17:59532591-59532592
  hyper
  sarcoma vs. multiple_myeloma
c

SEQ ID NO: 478205 - DNA, 9 bp, Homo sapiens
  chr17:59533751-59533760
  hyper
cgccccgca

SEQ ID NO: 478206 - DNA, 41 bp, Homo sapiens; identical to SEQ ID NO: 468883
  chr17:60885408-60885449
  hyper
  sarcoma vs. uterine,ovary,bladder_and_urothelial, pancreas_gallbladder,colorectal,thyroid,cervical,upper_gi, myeloid_neoplasm,lung,non_cancer,renal,head_and_neck,anorectal, breast,multiple_myeloma

SEQ ID NO: 478207 - DNA, 308 bp, Homo sapiens; identical to SEQ ID NO: 347460
  chr17:60885548-60885856
  hyper
  sarcoma vs. uterine,ovary,bladder_and_urothelial, pancreas_gallbladder,colorectal,thyroid,cervical,upper_gi, myeloid_neoplasm,lung,non_cancer,renal,head_and_neck,anorectal, breast,multiple_myeloma

SEQ ID NO: 478208 - DNA, 406 bp, Homo sapiens; identical to SEQ ID NO: 335653
  chr17:65822956-65823362
  hyper
  sarcoma vs. ovary,breast,melanoma,cervical,prostate, multiple_myeloma,pancreas_gallbladder,uterine

SEQ ID NO: 478209 - DNA, 29 bp, Homo sapiens
  chr17:66434420-66434449
  hyper
  sarcoma vs. myeloid_neoplasm,prostate,colorectal, non_cancer,multiple_myeloma,pancreas_gallbladder,renal,upper_gi
cctggccccagccttagaagaggccactc

SEQ ID NO: 478210 - DNA, 52 bp, Homo sapiens
  chr17:76123746-76123798
  hyper
  sarcoma vs. breast,head_and_neck,anorectal,melanoma, uterine,upper_gi,cervical,colorectal,multiple_myeloma, pancreas_gallbladder,prostate,bladder_and_urothelial,ovary, thyroid
cgagtcctgccggcctctgccctggactcctcctgcgctcaccctcaggaac

SEQ ID NO: 478211 - DNA, 342 bp, Homo sapiens; identical to SEQ ID NO: 352026
  chr17:76123831-76124173
  hyper
  sarcoma vs. breast,head_and_neck,anorectal,melanoma, uterine,upper_gi,cervical,colorectal,multiple_myeloma, pancreas_gallbladder,prostate,bladder_and_urothelial,ovary, thyroid

SEQ ID NO: 478212 - DNA, 5 bp, Homo sapiens
  chr17:77216290-77216295
  hyper
  sarcoma vs. melanoma
cggct

SEQ ID NO: 478213 - DNA, 226 bp, Homo sapiens; identical to SEQ ID NO: 361158
  chr17:77216473-77216699
  hyper
  sarcoma vs. melanoma

SEQ ID NO: 478214 - DNA, 125 bp, Homo sapiens; identical to SEQ ID NO: 468888
  chr17:77778310-77778435
  hyper
  sarcoma vs. head_and_neck,bladder_and_urothelial, lymphoid_neoplasm,cervical,uterine,multiple_myeloma,anorectal, lung,prostate,breast,renal

SEQ ID NO: 478215 - DNA, 42 bp, Homo sapiens; identical to SEQ ID NO: 464314
  chr17:77788305-77788347
  hyper
  sarcoma vs. anorectal,breast

SEQ ID NO: 478216 - DNA, 234 bp, Homo sapiens; identical to SEQ ID NO: 464315
  chr17:77788400-77788634
  hyper
  sarcoma vs. anorectal,breast

SEQ ID NO: 478217 - DNA, 735 bp, Homo sapiens; identical to SEQ ID NO: 352037
  chr17:79007528-79008263
  hyper
  sarcoma vs. ovary,breast,renal,bladder_and_urothelial, liver_bileduct,upper_gi,cervical,prostate,pancreas_gallbladder, uterine,multiple_myeloma,colorectal

SEQ ID NO: 478218 - DNA, 685 bp, Homo sapiens
  chr17:79007862-79008547
  hyper
  sarcoma vs. breast,renal,bladder_and_urothelial,ovary, liver_bileduct,upper_gi,cervical
cgcatgagagtcctccgggcccctcgtttcctactgccctcgacccttccttcccgagacctctctctctcagtaaactgcctccaacgagaatcttctgacggcaggagggtcctccccgtccctaagggtcgccctgtccccaggccttccagcaggacactcccctgtcccctctccagatcctccttcccagggccctcctccaagatcctcttccccaaccctcctctcccagggtcctcccctctccagaatcccggccccaagcccccaagcgctgtctgcctgtctggggtcctccccagagttcaccttctgcaggatcctccctccaagtcctctcctcacgatgctcccccgaaatcctccttctccaagtcgtcccccactccagggccgagctctctccagggtcctcctgcagcaccccctcccccagggttctcctctctgccccgaggggccggccggggggtcgccgcccgcccggcgggcttacctgcgaagcggcggggtcggggcctctcccacctgtaagcccggcccgcggcgtcctgcgtccgagccgctccccgccccgcagcgccaggccgcgacccggcgggccgcccgccccgaagtgccacttcgcgaagtgccgcctccacgcgcgctgccgccggcgccccccgctctcctcccc

SEQ ID NO: 478219 - DNA, 221 bp, Homo sapiens; identical to SEQ ID NO: 455803
  chr17:80186335-80186556
  hyper
  sarcoma vs. bladder_and_urothelial,colorectal, multiple_myeloma,upper_gi,anorectal,head_and_neck

SEQ ID NO: 478220 - DNA, 517 bp, Homo sapiens; identical to SEQ ID NO: 347473
  chr17:80186618-80187135
  hyper
  sarcoma vs. bladder_and_urothelial,colorectal, multiple_myeloma,upper_gi,anorectal,head_and_neck

SEQ ID NO: 478221 - DNA, 788 bp, Homo sapiens; identical to SEQ ID NO: 335730
  chr18:3246866-3247654
  hyper
  sarcoma vs. lymphoid_neoplasm

SEQ ID NO: 478222 - DNA, 435 bp, Homo sapiens; identical to SEQ ID NO: 347485
  chr18:12658128-12658563
  hyper
  sarcoma vs. cervical,bladder_and_urothelial,melanoma, lung,breast,non_cancer,renal,head_and_neck,myeloid_neoplasm, pancreas_gallbladder,thyroid,prostate,uterine,multiple_myeloma, colorectal

SEQ ID NO: 478223 - DNA, 48 bp, Homo sapiens; identical to SEQ ID NO: 335763
  chr18:19577719-19577767
  hyper
  sarcoma vs. melanoma,liver_bileduct,head_and_neck,renal, ovary,breast,lymphoid_neoplasm,upper_gi,colorectal, bladder_and_urothelial,pancreas_gallbladder,cervical,anorectal, multiple_myeloma,lung,prostate,uterine

SEQ ID NO: 478224 - DNA, 9 bp, Homo sapiens
  chr18:24128185-24128194
  hyper
  sarcoma vs. ovary,thyroid
caggggctc

SEQ ID NO: 478225 - DNA, 142 bp, Homo sapiens; identical to SEQ ID NO: 335782
  chr18:29598295-29598437
  hyper
  sarcoma vs. ovary,bladder_and_urothelial,lung, head_and_neck,colorectal,pancreas_gallbladder

SEQ ID NO: 478226 - DNA, 31 bp, Homo sapiens; identical to SEQ ID NO: 361237
  chr18:29599824-29599855
  hyper
  sarcoma vs. prostate,uterine

SEQ ID NO: 478227 - DNA, 556 bp, Homo sapiens; identical to SEQ ID NO: 335811
  chr18:46502500-46503056
  hyper
  sarcoma vs. lung,breast,colorectal,head_and_neck, prostate,pancreas_gallbladder,uterine,upper_gi,ovary,renal, liver_bileduct,bladder_and_urothelial,thyroid,cervical

SEQ ID NO: 478228 - DNA, 34 bp, Homo sapiens; identical to SEQ ID NO: 460822
  chr18:57365422-57365456
  hyper
  sarcoma vs. uterine

SEQ ID NO: 478229 - DNA, 125 bp, Homo sapiens; identical to SEQ ID NO: 335842
  chr18:60987974-60988099
  hyper
  sarcoma vs. lung

SEQ ID NO: 478230 - DNA, 817 bp, Homo sapiens; identical to SEQ ID NO: 347518
  chr18:74844285-74845102
  hyper
  sarcoma vs. pancreas_gallbladder,head_and_neck,lung, cervical,upper_gi,anorectal,liver_bileduct,colorectal,breast, prostate,renal,ovary,uterine,thyroid,non_cancer, myeloid_neoplasm

SEQ ID NO: 478231 - DNA, 584 bp, Homo sapiens; identical to SEQ ID NO: 462594
  chr18:77160022-77160606
  hyper
  sarcoma vs. myeloid_neoplasm,non_cancer,thyroid, multiple_myeloma

SEQ ID NO: 478232 - DNA, 67 bp, Homo sapiens; identical to SEQ ID NO: 352120
  chr18:77160661-77160728
  hyper
  sarcoma vs. myeloid_neoplasm,non_cancer,thyroid, multiple_myeloma

SEQ ID NO: 478233 - DNA, 75 bp, Homo sapiens; identical to SEQ ID NO: 335859
  chr18:77724415-77724490
  hyper
  sarcoma vs. liver_bileduct,pancreas_gallbladder, head_and_neck

SEQ ID NO: 478234 - DNA, 165 bp, Homo sapiens; identical to SEQ ID NO: 464332
  chr19:660994-661159
  hyper
  sarcoma vs. liver_bileduct

SEQ ID NO: 478235 - DNA, 2 bp, Homo sapiens
  chr19:661261-661263
  hyper
  sarcoma vs. liver_bileduct
tc

SEQ ID NO: 478236 - DNA, 156 bp, Homo sapiens; identical to SEQ ID NO: 464334
  chr19:661431-661587
  hyper
  sarcoma vs. lymphoid_neoplasm,breast

SEQ ID NO: 478237 - DNA, 296 bp, Homo sapiens; identical to SEQ ID NO: 352131
  chr19:661720-662016
  hyper
  sarcoma vs. lymphoid_neoplasm,breast

SEQ ID NO: 478238 - DNA, 153 bp, Homo sapiens
  chr19:1444961-1445114
  hyper
  sarcoma vs. multiple_myeloma,lymphoid_neoplasm,melanoma, non_cancer,renal,myeloid_neoplasm,uterine, bladder_and_urothelial,thyroid,cervical
cggcgcttctcacatccccgcggcctcccccctggacggcagtttacactgaactcggcgccctcccctgacttctgaaggaggagtcctgggtggccccgaagcctccccggcagccgcacggctccgtccccgctccagggttcagctgag

SEQ ID NO: 478239 - DNA, 18 bp, Homo sapiens
  chr19:1445157-1445175
  hyper
  sarcoma vs. multiple_myeloma,lymphoid_neoplasm,melanoma, non_cancer,renal,myeloid_neoplasm,uterine, bladder_and_urothelial,thyroid,cervical
gcgcccctttctccggcc

SEQ ID NO: 478240 - DNA, 318 bp, Homo sapiens; identical to SEQ ID NO: 335890
  chr19:1853369-1853687
  hyper
  sarcoma vs. liver_bileduct,lymphoid_neoplasm,melanoma

SEQ ID NO: 478241 - DNA, 15 bp, Homo sapiens
  chr19:1856948-1856963
  hyper
  sarcoma vs. colorectal,myeloid_neoplasm,thyroid, non_cancer,lymphoid_neoplasm,multiple_myeloma
cggggtggggggggc

SEQ ID NO: 478242 - DNA, 109 bp, Homo sapiens; identical to SEQ ID NO: 345559
  chr19:1857456-1857565
  hyper
  sarcoma vs. colorectal,myeloid_neoplasm,thyroid, non_cancer,lymphoid_neoplasm,multiple_myeloma

SEQ ID NO: 478243 - DNA, 343 bp, Homo sapiens; identical to SEQ ID NO: 335892
  chr19:1862256-1862599
  hyper
  sarcoma vs. pancreas_gallbladder,ovary,upper_gi,lung, breast

SEQ ID NO: 478244 - DNA, 407 bp, Homo sapiens; identical to SEQ ID NO: 335919
  chr19:5686667-5687074
  hyper
  sarcoma vs. melanoma

SEQ ID NO: 478245 - DNA, 291 bp, Homo sapiens; identical to SEQ ID NO: 471110
  chr19:5961947-5962238
  hyper
  sarcoma vs. thyroid,prostate,myeloid_neoplasm,non_cancer, colorectal

SEQ ID NO: 478246 - DNA, 45 bp, Homo sapiens; identical to SEQ ID NO: 352170
  chr19:5962455-5962500
  hyper
  sarcoma vs. thyroid,prostate,myeloid_neoplasm,non_cancer, colorectal

SEQ ID NO: 478247 - DNA, 307 bp, Homo sapiens
  chr19:6530758-6531065
  hyper
  sarcoma vs. melanoma
cgggaaagagcggcagagagggagaaccagggcgatggagagacagcagggagaaaggaacctggagccgagcttggaaggccggaaacggaaaggagagcgaaaagcggagagagatccgagtggagaaaattccgcagagtcacggggacgaggggaaaggctctgggctgggaaggggcgtggccgcgggcggaggggcgtggccgcgggcggaggggcgtggcctccttttgtagccaagcagctataaaaagcggcgcgctgtgtcttcccgcagtctctcgtcatggaatacgcctctgac

SEQ ID NO: 478248 - DNA, 97 bp, Homo sapiens; identical to SEQ ID NO: 361397
  chr19:6531295-6531392
  hyper
  sarcoma vs. melanoma

SEQ ID NO: 478249 - DNA, 150 bp, Homo sapiens; identical to SEQ ID NO: 335923
  chr19:6768009-6768159
  hyper
  sarcoma vs. lymphoid_neoplasm,upper_gi

SEQ ID NO: 478250 - DNA, 112 bp, Homo sapiens; identical to SEQ ID NO: 335925
  chr19:7701796-7701908
  hyper
  sarcoma vs. upper_gi,lung,liver_bileduct,ovary, bladder_and_urothelial,colorectal,prostate

SEQ ID NO: 478251 - DNA, 992 bp, Homo sapiens; identical to SEQ ID NO: 335937
  chr19:10381056-10382048
  hyper
  sarcoma vs. lymphoid_neoplasm,melanoma, pancreas_gallbladder,cervical,breast,multiple_myeloma

SEQ ID NO: 478252 - DNA, 39 bp, Homo sapiens; identical to SEQ ID NO: 452979
  chr19:10616220-10616259
  hyper
  sarcoma vs. bladder_and_urothelial

SEQ ID NO: 478253 - DNA, 285 bp, Homo sapiens; identical to SEQ ID NO: 462610
  chr19:11532739-11533024
  hyper
  sarcoma vs. head_and_neck,anorectal

SEQ ID NO: 478254 - DNA, 10 bp, Homo sapiens
  chr19:11533632-11533642
  hyper
  sarcoma vs. head_and_neck,anorectal
ctgagctggc

SEQ ID NO: 478255 - DNA, 58 bp, Homo sapiens; identical to SEQ ID NO: 475536
  chr19:11689628-11689686
  hyper
  sarcoma vs. thyroid

SEQ ID NO: 478256 - DNA, 14 bp, Homo sapiens
  chr19:11998456-11998470
  hyper
  sarcoma vs. pancreas_gallbladder,colorectal
cgcccttggaaaag

SEQ ID NO: 478257 - DNA, 172 bp, Homo sapiens; identical to SEQ ID NO: 352202
  chr19:11999219-11999391
  hyper
  sarcoma vs. pancreas_gallbladder,colorectal

SEQ ID NO: 478258 - DNA, 160 bp, Homo sapiens
  chr19:12946904-12947064
  hyper
  sarcoma vs. ovary,breast,prostate,uterine,colorectal
cgaatgccctgtctgcagtgtcaactattaatcctgtgcgggagaagcggaatccacttggccgagcggctctgcagctgagattggaggtggcgtctgtttacactgacgccaaagacccgaacttccgccgctccagtttgaccctttcttcgtccct

SEQ ID NO: 478259 - DNA, 259 bp, Homo sapiens; identical to SEQ ID NO: 352214
  chr19:12947127-12947386
  hyper
  sarcoma vs. ovary,breast,prostate,uterine,colorectal

SEQ ID NO: 478260 - DNA, 61 bp, Homo sapiens
  chr19:13208370-13208431
  hyper
  sarcoma vs. cervical,myeloid_neoplasm,head_and_neck, bladder_and_urothelial,prostate,non_cancer,renal,upper_gi, uterine,anorectal,ovary,breast,pancreas_gallbladder,thyroid, lung,lymphoid_neoplasm,multiple_myeloma
cggctggactgctccggccgcgggtctccccgggcgcccctccctggggcccagcacccct

SEQ ID NO: 478261 - DNA, 206 bp, Homo sapiens
  chr19:13208478-13208684
  hyper
  sarcoma vs. cervical,myeloid_neoplasm,head_and_neck, bladder_and_urothelial,prostate,non_cancer,renal,upper_gi, uterine,anorectal,ovary,breast,pancreas_gallbladder,thyroid, lung,lymphoid_neoplasm,multiple_myeloma
gcccctcccccgcagaggtcaatgccaacgaacaaacgtcccctccctccctccctctccgccccgagcgcccttctttgagccagacgccaacttgaccctcaccagcattatcaggagcgcgctcagcaagttggtagtttcctcccccctttcccggcgcccctcccgcccccattcaacatctctcatcctatccccgaccc

SEQ ID NO: 478262 - DNA, 285 bp, Homo sapiens
  chr19:13208945-13209230
  hyper
  sarcoma vs. cervical,myeloid_neoplasm,head_and_neck, bladder_and_urothelial,prostate,non_cancer,renal,upper_gi, uterine,anorectal,ovary,breast,pancreas_gallbladder,thyroid, lung,lymphoid_neoplasm,multiple_myeloma
acccaccactcccccaccctgaccgtgctgaacagacccccccacacgagagaaaataaaggagcaataaagtcacgagaactttcgtcccccaatcgagagcccgaggggcaccccagccccgcctctgctcccccccaccccacccaccctcggggcgcccccctccccccgcaagccagcctgggccagccccgcttcggcccctcccgggagatccgtgcgcccgaccagcaccagcatcgcggaccgcaaaggccgcccgtcccgtcaaacaagtttctt

SEQ ID NO: 478263 - DNA, 285 bp, Homo sapiens; identical to SEQ ID NO: 478262
  chr19:13208945-13209230
  hyper
  sarcoma vs. bladder_and_urothelial,anorectal,cervical, myeloid_neoplasm,thyroid,renal,prostate,head_and_neck, pancreas_gallbladder,uterine,upper_gi,non_cancer,breast,lung, multiple_myeloma,colorectal,ovary

SEQ ID NO: 478264 - DNA, 447 bp, Homo sapiens
  chr19:13209259-13209706
  hyper
  sarcoma vs. bladder_and_urothelial,anorectal,cervical, myeloid_neoplasm,thyroid,renal,prostate,head_and_neck, pancreas_gallbladder,uterine,upper_gi,non_cancer,breast,lung, multiple_myeloma,colorectal,ovary
tatctctatatatagtactaatggatttggtgtgcttcccccttagcgtccccctccctctgctcctcctccttcagcctggtctccccctcttctctgccctccacccccgtctctgcactgagatacataagaaacaagggtagtttactgtctgttttgttttctgggttttcagtgtcctagcggaatgcaagtaggcagccagcccgtctgttccctctccgccccgccccgccccgcccccgtcactgcgcttctgttataccatctttgcctgactctctccggcttctccattgaatggctaatgtgtatgtgaaataaagaaataaagaaaaacaaacgcgagagcgcctgacccttcgctaacgcgaccgtgcgggactgggtcggggtcggtagggtgcgtccccgacttggattctgcgcctctgtccaagcgcc

SEQ ID NO: 478265 - DNA, 857 bp, Homo sapiens; identical to SEQ ID NO: 475538
  chr19:13265772-13266629
  hyper
  sarcoma vs. upper_gi,breast,lymphoid_neoplasm, bladder_and_urothelial,head_and_neck,lung,multiple_myeloma, colorectal,ovary,anorectal,uterine,non_cancer, pancreas_gallbladder,myeloid_neoplasm,renal,thyroid,cervical,
  CONT. FROM ABOVE: liver_bileduct

SEQ ID NO: 478266 - DNA, 872 bp, Homo sapiens; identical to SEQ ID NO: 475539
  chr19:13266157-13267029
  hyper
  sarcoma vs. multiple_myeloma,lymphoid_neoplasm,anorectal, breast,uterine,thyroid,non_cancer,myeloid_neoplasm,lung,ovary, pancreas_gallbladder,renal,upper_gi,colorectal,head_and_neck

SEQ ID NO: 478267 - DNA, 881 bp, Homo sapiens; identical to SEQ ID NO: 347555
  chr19:14073521-14074402
  hyper
  sarcoma vs. melanoma,liver_bileduct,lymphoid_neoplasm, bladder_and_urothelial,lung,breast,pancreas_gallbladder, prostate,anorectal,cervical,colorectal,upper_gi,uterine

SEQ ID NO: 478268 - DNA, 897 bp, Homo sapiens
  chr19:14073926-14074823
  hyper
  sarcoma vs. melanoma,liver_bileduct,lymphoid_neoplasm, bladder_and_urothelial,pancreas_gallbladder
cgcgcacctcgcccatgacggcgatgggggtctcgcccttggcctgggctacgcggtgctcgatcaggtagtacatgtactcgtcgtagagcagccggatgaggtggaaggaaccgaagctggcggcgctgcgcagggtcaggtcccggatcaccatggagctggggatggagacggagaggagaccgtcaggccccgtccggcccgaccccctctccccctccccgctgcgatgcgcccgggcctcgcgccagcccagtgactcaggctggatcccgcacagccttcccggcacatgagcccagggccccagcctgcccgcccagcctgcaggctcgggtcgtcgtagaagagcacctgagacccccagggacgcggggccttccctggtgccgcccggacccgatcccgccgcgcgcgcacctgtagaaggaccacttgaggaggaagagcttggcggccttggggaagccggcgctgccctggtagggcttgagcacctggctcaccacgccgtccagccaggccgcccactgctccagcgagttctgctgctgcagcgtcaccttgaagtcctgctccagccgctgcaccacgcggtcctcgcagcggcacacccacgaggcctgctcctggggcacagagggtgggcgggcgcccggggctcagccgccgtcacccccgcctggcccgccccgttaggctgcccctcattcgcccgccccgccccgccccgcgctcacctgcacgttggcgaagtccacgcggttgaggtcgctcagcatctggttgatctgtgcggtgttctgcagcacagcgcgcgccgcctgcgccaggtggttgagcgacgtgtagcgccgcagtgtctgcgcgaaggcgccagccgcggccacctgc

SEQ ID NO: 478269 - DNA, 33 bp, Homo sapiens; identical to SEQ ID NO: 455824
  chr19:14584167-14584200
  hyper
  sarcoma vs. thyroid

SEQ ID NO: 478270 - DNA, 1 bp, Homo sapiens
  chr19:14584882-14584883
  hyper
  sarcoma vs. thyroid
c

SEQ ID NO: 478271 - DNA, 6 bp, Homo sapiens
  chr19:17717524-17717530
  hyper
  sarcoma vs. melanoma
ccgcac

SEQ ID NO: 478272 - DNA, 133 bp, Homo sapiens; identical to SEQ ID NO: 455836
  chr19:17958343-17958476
  hyper
  sarcoma vs. lymphoid_neoplasm

SEQ ID NO: 478273 - DNA, 9 bp, Homo sapiens
  chr19:18336722-18336731
  hyper
  sarcoma vs. multiple_myeloma
cgcacagcc

SEQ ID NO: 478274 - DNA, 203 bp, Homo sapiens
  chr19:18337130-18337333
  hyper
  sarcoma vs. multiple_myeloma
accaaaagcttcctgaagagcccgggggagccgcgcggggatccccgaggggagccgggcccggggaccggggcgggcgcgggggggccctgcatcgccaggactgcgtggaggctggaccgagcgccggctgcgcgggaccttttctggacagctgcgggggcggggcccagcggggagggggcaaagggcgcatcggcccc

SEQ ID NO: 478275 - DNA, 12 bp, Homo sapiens
  chr19:18337346-18337358
  hyper
  sarcoma vs. multiple_myeloma
cggctccctgac

SEQ ID NO: 478276 - DNA, 91 bp, Homo sapiens
  chr19:18714365-18714456
  hyper
  sarcoma vs. cervical,ovary,anorectal,colorectal, pancreas_gallbladder,uterine,multiple_myeloma
cggctggaagaagggactgcaggaggcaggggcagcccagcttcgcagagatggcagccaaggacagggtgatcctggcccccagggaggc

SEQ ID NO: 478277 - DNA, 68 bp, Homo sapiens; identical to SEQ ID NO: 336022
  chr19:18715135-18715203
  hyper
  sarcoma vs. cervical,ovary,anorectal,colorectal, pancreas_gallbladder,uterine,multiple_myeloma

SEQ ID NO: 478278 - DNA, 452 bp, Homo sapiens
  chr19:18715787-18716239
  hyper
  sarcoma vs. bladder_and_urothelial,myeloid_neoplasm, colorectal,thyroid
cgggggtccccatctcccgtcccgctggtacctgcagacactttacgacccacccgcctgctggtcaggtgctaagacacaccgtaagtagaaacatattgccgaggtgtgagaatcttttatttaatttcttccccccttaaaggaaaaaacacacttacagtgcccccccaccccctacaccttcgcctgctgctctactggctgaaaacaaagcttggcgctcacagtggcactcacaggcgctgcccaccgcctggcagagccgtcaggggccctgggagggcccgaggtagcccctcacctgaaagccaggggagagccaggctttcagcaagtgcccctagaagatgcccggaccctgccccttcccggaggagccctacaggcagcccgcaaacagcccagcacagggtggatgagcctgggagcagtgtgtgcccggcgacccc

SEQ ID NO: 478279 - DNA, 451 bp, Homo sapiens
  chr19:18716283-18716734
  hyper
  sarcoma vs. bladder_and_urothelial,myeloid_neoplasm, colorectal,thyroid
catctggggcgagtggtgcctgcctctgtgcccctgggtcgcctcccctgtgggatgtgtgtgaccgtgaatgtgtgtgtcggggatggaatgtgtgtgcgtccgcgatggtgcgcgaatgtgcacctgggatgcagtgtgcgcgagtttgagggcgagggtgacgggccacaagccagtgtgattctttgtgtgtctctgggtgtgtcccagagcgggtctgcatacggagacgtatccttgcgggggtgttccttggatggggggccccagagtgcctgaggccagaagtccctccagggcaggggtcttggcccgtagggcagcgggttcccagtgggccccctcaaagtttgggcccgctggtgcccggactcactggctcccgctccctctccctctcacccactcgctcacaaagattcctctcgctggaggctctccgcccgac

SEQ ID NO: 478280 - DNA, 453 bp, Homo sapiens
  chr19:18716283-18716736
  hyper
  sarcoma vs. bladder_and_urothelial
catctggggcgagtggtgcctgcctctgtgcccctgggtcgcctcccctgtgggatgtgtgtgaccgtgaatgtgtgtgtcggggatggaatgtgtgtgcgtccgcgatggtgcgcgaatgtgcacctgggatgcagtgtgcgcgagtttgagggcgagggtgacgggccacaagccagtgtgattctttgtgtgtctctgggtgtgtcccagagcgggtctgcatacggagacgtatccttgcgggggtgttccttggatggggggccccagagtgcctgaggccagaagtccctccagggcaggggtcttggcccgtagggcagcgggttcccagtgggccccctcaaagtttgggcccgctggtgcccggactcactggctcccgctccctctccctctcacccactcgctcacaaagattcctctcgctggaggctctccgcccgacgc

SEQ ID NO: 478281 - DNA, 350 bp, Homo sapiens; identical to SEQ ID NO: 361492
  chr19:18716847-18717197
  hyper
  sarcoma vs. bladder_and_urothelial

SEQ ID NO: 478282 - DNA, 298 bp, Homo sapiens; identical to SEQ ID NO: 462628
  chr19:19738875-19739173
  hyper
  sarcoma vs. head_and_neck,lung,uterine,breast

SEQ ID NO: 478283 - DNA, 247 bp, Homo sapiens; identical to SEQ ID NO: 205295
  chr19:19739428-19739675
  hyper
  sarcoma vs. head_and_neck,lung,uterine,breast

SEQ ID NO: 478284 - DNA, 390 bp, Homo sapiens; identical to SEQ ID NO: 462642
  chr19:38754883-38755273
  hyper
  sarcoma vs. head_and_neck,upper_gi,breast,lung

SEQ ID NO: 478285 - DNA, 175 bp, Homo sapiens; identical to SEQ ID NO: 347598
  chr19:38755344-38755519
  hyper
  sarcoma vs. head_and_neck,upper_gi,breast,lung

SEQ ID NO: 478286 - DNA, 259 bp, Homo sapiens
  chr19:40323996-40324255
  hyper
  sarcoma vs. ovary,anorectal,prostate,non_cancer
cggcgctgaaaaggcgaccgcctgtctctggcccggccggccccgcggcggggagggcaagcgggacaggaggcccggtgggtgacaacagcagccgccactgccaccgggggcggggagaggaggggacaagggtcagcccagggcacgcgggggaagagtagagcaggtggacgggggaggggcgacacgccccaccctgagtgaccaccagcccctagggacccggcgtcccgccccccacccaggaggccctcct

SEQ ID NO: 478287 - DNA, 28 bp, Homo sapiens
  chr19:40325018-40325046
  hyper
  sarcoma vs. anorectal,ovary,cervical,thyroid,renal, non_cancer,prostate,uterine,multiple_myeloma,lymphoid_neoplasm, breast,lung
ccaaccccgcaaaattgaccaagggtgc

SEQ ID NO: 478288 - DNA, 6 bp, Homo sapiens
  chr19:41055104-41055110
  hyper
  sarcoma vs. multiple_myeloma,prostate,thyroid, bladder_and_urothelial,non_cancer,uterine,myeloid_neoplasm, ovary,renal,breast,colorectal,lymphoid_neoplasm
cgcagg

SEQ ID NO: 478289 - DNA, 29 bp, Homo sapiens
  chr19:41055420-41055449
  hyper
  sarcoma vs. multiple_myeloma,prostate,thyroid, bladder_and_urothelial,non_cancer,uterine,myeloid_neoplasm, ovary,renal,breast,colorectal,lymphoid_neoplasm
cactcatacgctgaaagacgcattcagcc

SEQ ID NO: 478290 - DNA, 33 bp, Homo sapiens
  chr19:41060353-41060386
  hyper
  sarcoma vs. bladder_and_urothelial,uterine,colorectal, thyroid,cervical
gagggcctgggggcgctggagccgggggccgcc

SEQ ID NO: 478291 - DNA, 27 bp, Homo sapiens
  chr19:41060498-41060525
  hyper
  sarcoma vs. bladder_and_urothelial,uterine,colorectal, thyroid,cervical
cgcgcagctgtcgcgccagtgccgggc

SEQ ID NO: 478292 - DNA, 49 bp, Homo sapiens
  chr19:41105938-41105987
  hyper
  sarcoma vs. liver_bileduct,breast,pancreas_gallbladder, prostate,colorectal,ovary,head_and_neck,non_cancer,uterine, upper_gi
cggtgacagcagcttttccgtcctctcccacccaggctccaggaggcca

SEQ ID NO: 478293 - DNA, 86 bp, Homo sapiens; identical to SEQ ID NO: 347601
  chr19:41106420-41106506
  hyper
  sarcoma vs. liver_bileduct,breast,pancreas_gallbladder, prostate,colorectal,ovary,head_and_neck,non_cancer,uterine, upper_gi

SEQ ID NO: 478294 - DNA, 678 bp, Homo sapiens; identical to SEQ ID NO: 361600
  chr19:41111116-41111794
  hyper
  sarcoma vs. head_and_neck,melanoma,upper_gi,lung,renal

SEQ ID NO: 478295 - DNA, 17 bp, Homo sapiens
  chr19:41115505-41115522
  hyper
  sarcoma vs. melanoma,breast,bladder_and_urothelial, upper_gi,head_and_neck,colorectal,renal,non_cancer, pancreas_gallbladder,lung,myeloid_neoplasm,uterine,prostate, multiple_myeloma,lymphoid_neoplasm,thyroid,cervical
cggctacacctgcgctt

SEQ ID NO: 478296 - DNA, 69 bp, Homo sapiens; identical to SEQ ID NO: 345594
  chr19:41115811-41115880
  hyper
  sarcoma vs. melanoma,breast,bladder_and_urothelial, upper_gi,head_and_neck,colorectal,renal,non_cancer, pancreas_gallbladder,lung,myeloid_neoplasm,uterine,prostate, multiple_myeloma,lymphoid_neoplasm,thyroid,cervical

SEQ ID NO: 478297 - DNA, 272 bp, Homo sapiens; identical to SEQ ID NO: 336163
  chr19:45195351-45195623
  hyper
  sarcoma vs. lymphoid_neoplasm

SEQ ID NO: 478298 - DNA, 844 bp, Homo sapiens
  chr19:46144663-46145507
  hyper
  sarcoma vs. melanoma,lymphoid_neoplasm,upper_gi,breast
cgtccagcttctaaaaactctggccacgcccctcaatattgactccgccctcccagaccttccactgttaccgtgccacctcaagattggtccctccaaggctctggcaccgtccccgcttttgaactagctggccccactctaggttacgacctcgtggcctggggcatgactacatttctcgaccatttcctccctatctctttctgcggcttgacgccgccccagtccttacccttcctttttggcgctacagttgctgctggaggatgtggtccggctgcgggggtcctcacggcgcaccgaggcgaggcgctctggtgacaagtagcggcggacactgctaaaagagagcacacaggtgggggcagagccttctaggccagcaggcgagtgccgtgagcaagcgagattctccctgcaccctctgctgctggagctcaggcaaacaaaccacctctgtctcccacgaggtcttggaagaggctgggggtcccggccttgtgccttacctgcgcccggaggtcgcctccttcttgggagaggatggggacgtggcatagccacccacgcgccgcgggggtcccgagccattaaggggcgtcctggtgggaaggcctttcaagagctgacacactggagggatggggttaggggacagaagagggtgagtataaggaccaggccccggtcctccccatcccacccctccagtctaacggggatacccgaggcagtggtgcctaagcgcggaggcgcccggcccttgggggtgccccgcgcgcgtagcgccgctccctgttcttcgcatgcccgcaggcgacgcagagcatccgccagcgcc

SEQ ID NO: 478299 - DNA, 73 bp, Homo sapiens; identical to SEQ ID NO: 352336
  chr19:46145557-46145630
  hyper
  sarcoma vs. melanoma,lymphoid_neoplasm,upper_gi,breast

SEQ ID NO: 478300 - DNA, 70 bp, Homo sapiens; identical to SEQ ID NO: 455850
  chr19:46907118-46907188
  hyper
  sarcoma vs. renal,bladder_and_urothelial

SEQ ID NO: 478301 - DNA, 250 bp, Homo sapiens; identical to SEQ ID NO: 455851
  chr19:46907822-46908072
  hyper
  sarcoma vs. renal,bladder_and_urothelial

SEQ ID NO: 478302 - DNA, 68 bp, Homo sapiens; identical to SEQ ID NO: 336186
  chr19:47040909-47040977
  hyper
  sarcoma vs. melanoma,liver_bileduct,pancreas_gallbladder, upper_gi,lymphoid_neoplasm,renal

SEQ ID NO: 478303 - DNA, 586 bp, Homo sapiens; identical to SEQ ID NO: 374850
  chr19:47137785-47138371
  hyper
  sarcoma vs. melanoma

SEQ ID NO: 478304 - DNA, 148 bp, Homo sapiens
  chr19:47922898-47923046
  hyper
  sarcoma vs. bladder_and_urothelial,multiple_myeloma, anorectal,cervical,pancreas_gallbladder,renal,prostate
cggtgggagtcggggaggggcaggctgtggggggaggagaggaagagaccgcggccctggtgcccccaggcccctcctctcctacccagggctggggttcctgctccgggtttctcagtctccctctttcccagtctctctctccttg

SEQ ID NO: 478305 - DNA, 261 bp, Homo sapiens
  chr19:47923084-47923345
  hyper
  sarcoma vs. bladder_and_urothelial,multiple_myeloma, anorectal,cervical,pancreas_gallbladder,renal,prostate
ctggctctctgttctccgagccccctggacacaccacggaccccctccctggccatctccaggggtcacgtgggaatctggagtctggtcccaccgtaggctctcccctctctgaggctcgattccccctctgcaggatgggcagtgcgctgggggcggcgggggtgggctgtggataacggagaaacagttaagctagagggtgccaggactcagggtcttggctgagtctgggggtccccatgccggcgggctctgccc

SEQ ID NO: 478306 - DNA, 3 bp, Homo sapiens
  chr19:47933823-47933826
  hyper
  sarcoma vs. myeloid_neoplasm,multiple_myeloma
tgc

SEQ ID NO: 478307 - DNA, 94 bp, Homo sapiens; identical to SEQ ID NO: 455855
  chr19:49127280-49127374
  hyper
  sarcoma vs. melanoma

SEQ ID NO: 478308 - DNA, 485 bp, Homo sapiens
  chr19:49217005-49217490
  hyper
  sarcoma vs. head_and_neck,melanoma,lung,breast,uterine, bladder_and_urothelial,renal,prostate,upper_gi,colorectal, pancreas_gallbladder,non_cancer,ovary,thyroid,liver_bileduct, cervical,myeloid_neoplasm,multiple_myeloma,lymphoid_neoplasm,
  CONT. FROM ABOVE: anorectal
cgatgccccggttaggaagcaactgcggatggagaaatttggcgtgaactcgggactgcgacctggacctgactggagaaccctagccggattcaacccacaccctcttacctgcgccctccggatcgcttcctgcagctcctcctccagagtcagagccgctgagcccggccctgaggaaggggtcagggctggagctgcagcaggagccggagtgggagttggagccggagccgtccccggggtatccgcggcacgtggaagaggtggcctgtgagatgctgcgctgggcttgacctagagcagccaagagggcgagcgcccataagccatgcccacagggcgcaaccccacccactcgcaacgtgtggctccaccccttgatcctctcgcgacccctcgctcatcaacccctttggcctcgccccctattctttcattggctcctcttctctaaagatccgccccctgttagtctgaaccac

SEQ ID NO: 478309 - DNA, 43 bp, Homo sapiens; identical to SEQ ID NO: 345600
  chr19:49217526-49217569
  hyper
  sarcoma vs. head_and_neck,melanoma,lung,breast,uterine, bladder_and_urothelial,renal,prostate,upper_gi,colorectal, pancreas_gallbladder,non_cancer,ovary,thyroid,liver_bileduct, cervical,myeloid_neoplasm,multiple_myeloma,lymphoid_neoplasm,
  CONT. FROM ABOVE: anorectal

SEQ ID NO: 478310 - DNA, 619 bp, Homo sapiens; identical to SEQ ID NO: 468937
  chr19:49255778-49256397
  hyper

SEQ ID NO: 478311 - DNA, 15 bp, Homo sapiens
  chr19:49256438-49256453
  hyper
tgcaggtgctcccgc

SEQ ID NO: 478312 - DNA, 181 bp, Homo sapiens
  chr19:50353790-50353971
  hyper
  sarcoma vs. upper_gi
cgaatgagcgaatccacggaaggccggggagcgacgtgagtggcgagaagcttggagtcgccagggacggcgggcggagcctgggcgccggggctaatgggcggagcctccagggacagctggccccgcccaggccgcgcggggcccgctgggagttggagtcccttgcccacctcgccac

SEQ ID NO: 478313 - DNA, 330 bp, Homo sapiens; identical to SEQ ID NO: 336223
  chr19:50828897-50829227
  hyper
  sarcoma vs. melanoma,liver_bileduct,pancreas_gallbladder, lung,ovary

SEQ ID NO: 478314 - DNA, 89 bp, Homo sapiens; identical to SEQ ID NO: 476922
  chr19:50836203-50836292
  hyper
  sarcoma vs. liver_bileduct,melanoma

SEQ ID NO: 478315 - DNA, 589 bp, Homo sapiens; identical to SEQ ID NO: 476923
  chr19:50836451-50837040
  hyper
  sarcoma vs. liver_bileduct,melanoma

SEQ ID NO: 478316 - DNA, 431 bp, Homo sapiens
  chr19:50836609-50837040
  hyper
  sarcoma vs. melanoma
cgcctttatggcggaccccggggtcctggaatgccaaggcagagaggagaaacaggagacgaggtccgagggaacggtatccccgccccttagaacaggaactggtaaacccttaccaattacagccacccccgactgccacctgtggctgccgtcgcgacctgtcgcctcccacgcatgttgtggctgcgcccgcccccgtcagggcgtgaccacggcgtggactacaacgaccgtgatgctccacggagccaggagcctttgacgaaaggcagcgtaggcgagggccttcatgggactcgtagtacaaggcccatcacaagggtgcgccgtggagaaaaggggtgatacccttcgcctccctctcttcctcaactccgtgggtccatgcacaaagctttctcttcaaaaagtacgctctgaaaagaagc

SEQ ID NO: 478317 - DNA, 88 bp, Homo sapiens; identical to SEQ ID NO: 345604
  chr19:50837389-50837477
  hyper
  sarcoma vs. melanoma

SEQ ID NO: 478318 - DNA, 12 bp, Homo sapiens
  chr19:51925116-51925128
  hyper
  sarcoma vs. melanoma
cgcaggtgcggc

SEQ ID NO: 478319 - DNA, 88 bp, Homo sapiens; identical to SEQ ID NO: 352381
  chr19:51925272-51925360
  hyper
  sarcoma vs. melanoma

SEQ ID NO: 478320 - DNA, 71 bp, Homo sapiens; identical to SEQ ID NO: 459560
  chr2:12856411-12856482
  hyper
  sarcoma vs. melanoma,anorectal,bladder_and_urothelial, cervical

SEQ ID NO: 478321 - DNA, 849 bp, Homo sapiens; identical to SEQ ID NO: 346418
  chr2:12856549-12857398
  hyper
  sarcoma vs. melanoma,anorectal,bladder_and_urothelial, cervical

SEQ ID NO: 478322 - DNA, 359 bp, Homo sapiens; identical to SEQ ID NO: 357101
  chr2:16790115-16790474
  hyper
  sarcoma vs. melanoma,head_and_neck,lung,upper_gi

SEQ ID NO: 478323 - DNA, 297 bp, Homo sapiens; identical to SEQ ID NO: 349464
  chr2:19551656-19551953
  hyper
  sarcoma vs. thyroid

SEQ ID NO: 478324 - DNA, 142 bp, Homo sapiens
  chr2:19563170-19563312
  hyper
  sarcoma vs. myeloid_neoplasm
cgtccttgctctcagatggatgagggcttttgtttgtttgtttgtttgtttttaaataatccgaaattcctagcaactatctgccgccgttcgcttctggtcctgggaagacgatgagcaaagatctactgggaccccatcc

SEQ ID NO: 478325 - DNA, 67 bp, Homo sapiens; identical to SEQ ID NO: 357116
  chr2:19563433-19563500
  hyper
  sarcoma vs. myeloid_neoplasm

SEQ ID NO: 478326 - DNA, 431 bp, Homo sapiens; identical to SEQ ID NO: 345003
  chr2:20425309-20425740
  hyper
  sarcoma vs. melanoma,liver_bileduct,renal,uterine, pancreas_gallbladder,cervical,breast,head_and_neck,colorectal, non_cancer,myeloid_neoplasm,bladder_and_urothelial,thyroid, prostate,upper_gi,multiple_myeloma,anorectal

SEQ ID NO: 478327 - DNA, 89 bp, Homo sapiens; identical to SEQ ID NO: 455877
  chr2:27473102-27473191
  hyper
  sarcoma vs. melanoma,upper_gi,pancreas_gallbladder, anorectal,lung,lymphoid_neoplasm,ovary,cervical, multiple_myeloma,uterine

SEQ ID NO: 478328 - DNA, 22 bp, Homo sapiens
  chr2:27473358-27473380
  hyper
  sarcoma vs. melanoma,upper_gi,pancreas_gallbladder, anorectal,lung,lymphoid_neoplasm,ovary,cervical, multiple_myeloma,uterine
ccttggccttcgcctcttaaac

SEQ ID NO: 478329 - DNA, 134 bp, Homo sapiens; identical to SEQ ID NO: 331260
  chr2:38342446-38342580
  hyper
  sarcoma vs. lymphoid_neoplasm,lung,melanoma, bladder_and_urothelial,breast

SEQ ID NO: 478330 - DNA, 104 bp, Homo sapiens; identical to SEQ ID NO: 369573
  chr2:45157711-45157815
  hyper
  sarcoma vs. non_cancer

SEQ ID NO: 478331 - DNA, 48 bp, Homo sapiens
  chr2:45164561-45164609
  hyper
  sarcoma vs. cervical,myeloid_neoplasm,non_cancer,uterine, upper_gi,colorectal,multiple_myeloma,thyroid
cggcggggctcattaggcagagcagggtgccgagaggtgcgcgtcgcc

SEQ ID NO: 478332 - DNA, 315 bp, Homo sapiens
  chr2:45165156-45165471
  hyper
  sarcoma vs. cervical,myeloid_neoplasm,non_cancer,uterine, upper_gi,colorectal,multiple_myeloma,thyroid
gagcaaggccaagtgggtgcagctgccccaaccctccggatcctcgtctcccggaggcctgcagacccgttggctttccctgtaacccaaaacaaggagagagtgggaggtctctcgggcgttctccagatgtggttgagactttcccagtgctggggtggcgggtgacatttgtaaataaatgccagttggtccgggtacaaggagaacactatttaaaccccaaagacatcttttctccctgccccacctgaaggcgatattttagatcgccggggccaggattgaagcggggatgatggcagcaaatttgtt

SEQ ID NO: 478333 - DNA, 315 bp, Homo sapiens; identical to SEQ ID NO: 478332
  chr2:45165156-45165471
  hyper
  sarcoma vs. multiple_myeloma,myeloid_neoplasm,thyroid

SEQ ID NO: 478334 - DNA, 29 bp, Homo sapiens
  chr2:45177234-45177263
  hyper
  sarcoma vs. thyroid,anorectal,non_cancer,cervical, uterine
cactgtgccgggcggggctcggcgggagc

SEQ ID NO: 478335 - DNA, 144 bp, Homo sapiens; identical to SEQ ID NO: 331289
  chr2:46689161-46689305
  hyper
  sarcoma vs. lymphoid_neoplasm

SEQ ID NO: 478336 - DNA, 462 bp, Homo sapiens; identical to SEQ ID NO: 345011
  chr2:47499350-47499812
  hyper
  sarcoma vs. melanoma,lymphoid_neoplasm,multiple_myeloma, breast,lung,pancreas_gallbladder,cervical,renal,upper_gi, prostate,uterine,non_cancer,colorectal,ovary,liver_bileduct, bladder_and_urothelial,myeloid_neoplasm

SEQ ID NO: 478337 - DNA, 1 bp, Homo sapiens
  chr2:54784837-54784838
  hyper
  sarcoma vs. anorectal,pancreas_gallbladder,lung,ovary, uterine,breast,head_and_neck,thyroid,bladder_and_urothelial, liver_bileduct,cervical,colorectal,upper_gi
c

SEQ ID NO: 478338 - DNA, 448 bp, Homo sapiens; identical to SEQ ID NO: 198207
  chr2:54784958-54785406
  hyper
  sarcoma vs. anorectal,pancreas_gallbladder,lung,ovary, uterine,breast,head_and_neck,thyroid,bladder_and_urothelial, liver_bileduct,cervical,colorectal,upper_gi

SEQ ID NO: 478339 - DNA, 321 bp, Homo sapiens; identical to SEQ ID NO: 468955
  chr2:54785408-54785729
  hyper
  sarcoma vs. anorectal,pancreas_gallbladder,lung,ovary, uterine,breast,head_and_neck,thyroid,bladder_and_urothelial, liver_bileduct,cervical,colorectal,upper_gi

SEQ ID NO: 478340 - DNA, 118 bp, Homo sapiens; identical to SEQ ID NO: 468956
  chr2:54785288-54785406
  hyper
  sarcoma vs. head_and_neck,anorectal,breast,lung,ovary, colorectal,upper_gi,liver_bileduct,uterine,pancreas_gallbladder, myeloid_neoplasm,cervical,thyroid

SEQ ID NO: 478341 - DNA, 715 bp, Homo sapiens; identical to SEQ ID NO: 468957
  chr2:54785408-54786123
  hyper
  sarcoma vs. head_and_neck,anorectal,breast,lung,ovary, colorectal,upper_gi,liver_bileduct,uterine,pancreas_gallbladder, myeloid_neoplasm,cervical,thyroid

SEQ ID NO: 478342 - DNA, 61 bp, Homo sapiens; identical to SEQ ID NO: 455886
  chr2:56149749-56149810
  hyper
  sarcoma vs. multiple_myeloma,ovary

SEQ ID NO: 478343 - DNA, 90 bp, Homo sapiens; identical to SEQ ID NO: 455887
  chr2:56150447-56150537
  hyper
  sarcoma vs. multiple_myeloma,ovary

SEQ ID NO: 478344 - DNA, 18 bp, Homo sapiens
  chr2:56150681-56150699
  hyper
  sarcoma vs. multiple_myeloma,ovary
cgaggctgcacacctcca

SEQ ID NO: 478345 - DNA, 90 bp, Homo sapiens; identical to SEQ ID NO: 455887
  chr2:56150447-56150537
  hyper
  sarcoma vs. ovary

SEQ ID NO: 478346 - DNA, 18 bp, Homo sapiens
  chr2:56150681-56150699
  hyper
  sarcoma vs. ovary
cgaggctgcacacctcca

SEQ ID NO: 478347 - DNA, 362 bp, Homo sapiens; identical to SEQ ID NO: 331309
  chr2:61109154-61109516
  hyper
  sarcoma vs. lymphoid_neoplasm,head_and_neck,melanoma, upper_gi,ovary,breast,colorectal,bladder_and_urothelial, prostate,uterine,lung,cervical,anorectal,pancreas_gallbladder

SEQ ID NO: 478348 - DNA, 109 bp, Homo sapiens; identical to SEQ ID NO: 331310
  chr2:61110127-61110236
  hyper
  sarcoma vs. head_and_neck,melanoma,lymphoid_neoplasm, bladder_and_urothelial,upper_gi,ovary,breast

SEQ ID NO: 478349 - DNA, 204 bp, Homo sapiens; identical to SEQ ID NO: 462687
  chr2:63278430-63278634
  hyper
  sarcoma vs. head_and_neck,pancreas_gallbladder,breast, non_cancer,bladder_and_urothelial

SEQ ID NO: 478350 - DNA, 282 bp, Homo sapiens; identical to SEQ ID NO: 349507
  chr2:63279141-63279423
  hyper
  sarcoma vs. head_and_neck,pancreas_gallbladder,breast, non_cancer,bladder_and_urothelial

SEQ ID NO: 478351 - DNA, 81 bp, Homo sapiens; identical to SEQ ID NO: 369613
  chr2:66654136-66654217
  hyper
  sarcoma vs. breast,prostate,bladder_and_urothelial

SEQ ID NO: 478352 - DNA, 228 bp, Homo sapiens; identical to SEQ ID NO: 331345
  chr2:74211299-74211527
  hyper
  sarcoma vs. anorectal,head_and_neck,lung,renal,ovary

SEQ ID NO: 478353 - DNA, 413 bp, Homo sapiens; identical to SEQ ID NO: 455891
  chr2:74729488-74729901
  hyper
  sarcoma vs. pancreas_gallbladder,anorectal,melanoma, colorectal,renal,cervical,liver_bileduct,upper_gi

SEQ ID NO: 478354 - DNA, 239 bp, Homo sapiens; identical to SEQ ID NO: 455892
  chr2:74729933-74730172
  hyper
  sarcoma vs. pancreas_gallbladder,anorectal,melanoma, colorectal,renal,cervical,liver_bileduct,upper_gi

SEQ ID NO: 478355 - DNA, 44 bp, Homo sapiens; identical to SEQ ID NO: 455893
  chr2:74729857-74729901
  hyper
  sarcoma vs. liver_bileduct,pancreas_gallbladder

SEQ ID NO: 478356 - DNA, 239 bp, Homo sapiens; identical to SEQ ID NO: 455892
  chr2:74729933-74730172
  hyper
  sarcoma vs. liver_bileduct,pancreas_gallbladder

SEQ ID NO: 478357 - DNA, 79 bp, Homo sapiens; identical to SEQ ID NO: 345021
  chr2:74730644-74730723
  hyper
  sarcoma vs. liver_bileduct,pancreas_gallbladder

SEQ ID NO: 478358 - DNA, 73 bp, Homo sapiens; identical to SEQ ID NO: 468965
  chr2:87034584-87034657
  hyper
  sarcoma vs. head_and_neck,ovary

SEQ ID NO: 478359 - DNA, 622 bp, Homo sapiens; identical to SEQ ID NO: 357234
  chr2:87034689-87035311
  hyper
  sarcoma vs. head_and_neck,ovary

SEQ ID NO: 478360 - DNA, 895 bp, Homo sapiens; identical to SEQ ID NO: 331365
  chr2:88315911-88316806
  hyper
  sarcoma vs. upper_gi,ovary,breast,colorectal, liver_bileduct,cervical,lung,head_and_neck,pancreas_gallbladder, bladder_and_urothelial,uterine,anorectal,renal,myeloid_neoplasm, thyroid,non_cancer,lymphoid_neoplasm,prostate,multiple_myeloma

SEQ ID NO: 478361 - DNA, 187 bp, Homo sapiens; identical to SEQ ID NO: 331375
  chr2:97073215-97073402
  hyper
  sarcoma vs. melanoma

SEQ ID NO: 478362 - DNA, 104 bp, Homo sapiens
  chr2:99346429-99346533
  hyper
  sarcoma vs. ovary
cgttttcgggtttacacgtgtgggttaaagaaatctatgtcaagataacctgttcatcaaactgttttttaaacattcagaaaaagaaacataaaccacaaaac

SEQ ID NO: 478363 - DNA, 244 bp, Homo sapiens; identical to SEQ ID NO: 369681
  chr2:99346574-99346818
  hyper
  sarcoma vs. ovary

SEQ ID NO: 478364 - DNA, 58 bp, Homo sapiens; identical to SEQ ID NO: 357255
  chr2:102972750-102972808
  hyper
  sarcoma vs. head_and_neck,upper_gi

SEQ ID NO: 478365 - DNA, 699 bp, Homo sapiens; identical to SEQ ID NO: 331404
  chr2:111877567-111878266
  hyper
  sarcoma vs. bladder_and_urothelial,pancreas_gallbladder, head_and_neck,lung,breast,upper_gi,colorectal,cervical, liver_bileduct,uterine,multiple_myeloma,anorectal,ovary, prostate

SEQ ID NO: 478366 - DNA, 154 bp, Homo sapiens; identical to SEQ ID NO: 331428
  chr2:121834588-121834742
  hyper
  sarcoma vs. lymphoid_neoplasm,upper_gi,liver_bileduct, head_and_neck,anorectal,melanoma,breast,pancreas_gallbladder, bladder_and_urothelial,cervical,colorectal,prostate, multiple_myeloma,renal,lung,ovary

SEQ ID NO: 478367 - DNA, 550 bp, Homo sapiens; identical to SEQ ID NO: 331437
  chr2:128173501-128174051
  hyper
  sarcoma vs. cervical,lung

SEQ ID NO: 478368 - DNA, 54 bp, Homo sapiens
  chr2:128421756-128421810
  hyper
  sarcoma vs. ovary
cgacgccggggcagagcccacggcgtcggagggccccggtcgggtttccgaggg

SEQ ID NO: 478369 - DNA, 12 bp, Homo sapiens
  chr2:128422082-128422094
  hyper
  sarcoma vs. ovary
ggcgcctccccc

SEQ ID NO: 478370 - DNA, 138 bp, Homo sapiens; identical to SEQ ID NO: 468986
  chr2:166649931-166650069
  hyper
  sarcoma vs. lung,breast,cervical,prostate,head_and_neck, anorectal

SEQ ID NO: 478371 - DNA, 38 bp, Homo sapiens; identical to SEQ ID NO: 468987
  chr2:166650106-166650144
  hyper
  sarcoma vs. lung,breast,cervical,prostate,head_and_neck, anorectal

SEQ ID NO: 478372 - DNA, 313 bp, Homo sapiens; identical to SEQ ID NO: 468988
  chr2:166650508-166650821
  hyper
  sarcoma vs. lung,breast,cervical,prostate,head_and_neck, anorectal

SEQ ID NO: 478373 - DNA, 362 bp, Homo sapiens; identical to SEQ ID NO: 464430
  chr2:171567970-171568332
  hyper
  sarcoma vs. ovary

SEQ ID NO: 478374 - DNA, 16 bp, Homo sapiens
  chr2:171568711-171568727
  hyper
  sarcoma vs. ovary
actgacccccgccccc

SEQ ID NO: 478375 - DNA, 93 bp, Homo sapiens; identical to SEQ ID NO: 464432
  chr2:171568239-171568332
  hyper
  sarcoma vs. ovary,uterine

SEQ ID NO: 478376 - DNA, 273 bp, Homo sapiens; identical to SEQ ID NO: 349618
  chr2:171568711-171568984
  hyper
  sarcoma vs. ovary,uterine

SEQ ID NO: 478377 - DNA, 170 bp, Homo sapiens; identical to SEQ ID NO: 468991
  chr2:172951779-172951949
  hyper
  sarcoma vs. myeloid_neoplasm

SEQ ID NO: 478378 - DNA, 170 bp, Homo sapiens; identical to SEQ ID NO: 468991
  chr2:172951779-172951949
  hyper
  sarcoma vs. myeloid_neoplasm,ovary

SEQ ID NO: 478379 - DNA, 26 bp, Homo sapiens
  chr2:172953071-172953097
  hyper
  sarcoma vs. myeloid_neoplasm
cagagggaagaaggaacagtggaggc

SEQ ID NO: 478380 - DNA, 10 bp, Homo sapiens
  chr2:172953124-172953134
  hyper
  sarcoma vs. myeloid_neoplasm
cgcgaggtcc

SEQ ID NO: 478381 - DNA, 113 bp, Homo sapiens
  chr2:172955255-172955368
  hyper
  sarcoma vs. myeloid_neoplasm,thyroid,non_cancer,uterine, anorectal,cervical
cgcttgctcagattagtttcctccagaggaacacgggcttcaagggactagaaccagattggttcccttctcgtggccctgcgtcccagcccagccccaacccccaccccaga

SEQ ID NO: 478382 - DNA, 57 bp, Homo sapiens; identical to SEQ ID NO: 346491
  chr2:172955887-172955944
  hyper
  sarcoma vs. myeloid_neoplasm,thyroid,non_cancer,uterine, anorectal,cervical

SEQ ID NO: 478383 - DNA, 518 bp, Homo sapiens; identical to SEQ ID NO: 462738
  chr2:175197265-175197783
  hyper
  sarcoma vs. thyroid,multiple_myeloma,colorectal,uterine, bladder_and_urothelial

SEQ ID NO: 478384 - DNA, 523 bp, Homo sapiens
  chr2:175197393-175197916
  hyper
  sarcoma vs. thyroid,non_cancer,uterine,myeloid_neoplasm, ovary,multiple_myeloma
cgtttctcctcctcggctgcacagggtgagtaggaaacgcctcgctgccacttaacaatccctctattagtaaatctacgcggagactctatgggaagccgagaaccagtgtcttcttccagggcagaagtcacctgttgggaacggcccccgggtccccctgctgggctttccggctcttctaggcggcctgatttctcctcagccctccacccagcgtccctcagggacttttcacacctccccacccccatttccactacagtctcccagggcacagcacttcattgacagccacacgagccttctcgttctcttctcctctgttccttctctttctcttctcctctgttccttctctttctctgtcataatttccttggtgctttcgccaccttaaacaaaaaagagaaaaaaataaaataaaaaaaacccattctgagccaaagtattttaagatgaatccaagaaagcgacccacatagccctccccacccacggagtgcgccaagacgcacccagg

SEQ ID NO: 478385 - DNA, 238 bp, Homo sapiens
  chr2:175198064-175198302
  hyper
  sarcoma vs. thyroid,non_cancer,uterine,myeloid_neoplasm, ovary,multiple_myeloma
gtttggggttggtagtttaattttttttttttcctaagaagcagggtgtgggtttagtggggagtgtgctatattaaaaccagtgcccaggtctgcccgagggcgctggtatttctggttcaaaaacagcttctggctaccctggagaagaaagagaaagcggggcccagaaagagaaaaacaagcaggtcagcggttgctgggggactcgaagacgcaccctggtctgcttgaggac

SEQ ID NO: 478386 - DNA, 50 bp, Homo sapiens; identical to SEQ ID NO: 464437
  chr2:175197866-175197916
  hyper
  sarcoma vs. bladder_and_urothelial

SEQ ID NO: 478387 - DNA, 455 bp, Homo sapiens; identical to SEQ ID NO: 464438
  chr2:175198064-175198519
  hyper
  sarcoma vs. bladder_and_urothelial

SEQ ID NO: 478388 - DNA, 351 bp, Homo sapiens; identical to SEQ ID NO: 454339
  chr2:175199018-175199369
  hyper
  sarcoma vs. myeloid_neoplasm,thyroid

SEQ ID NO: 478389 - DNA, 76 bp, Homo sapiens; identical to SEQ ID NO: 462741
  chr2:175204013-175204089
  hyper
  sarcoma vs. multiple_myeloma

SEQ ID NO: 478390 - DNA, 543 bp, Homo sapiens; identical to SEQ ID NO: 331523
  chr2:176937692-176938235
  hyper
  sarcoma vs. multiple_myeloma,upper_gi

SEQ ID NO: 478391 - DNA, 85 bp, Homo sapiens; identical to SEQ ID NO: 453139
  chr2:176975945-176976030
  hyper
  sarcoma vs. myeloid_neoplasm,thyroid,renal, multiple_myeloma,uterine,non_cancer,prostate,breast

SEQ ID NO: 478392 - DNA, 177 bp, Homo sapiens; identical to SEQ ID NO: 369847
  chr2:176983836-176984013
  hyper
  sarcoma vs. myeloid_neoplasm,renal

SEQ ID NO: 478393 - DNA, 486 bp, Homo sapiens; identical to SEQ ID NO: 331549
  chr2:179343487-179343973
  hyper
  sarcoma vs. lymphoid_neoplasm,lung, bladder_and_urothelial,upper_gi,anorectal,colorectal, liver_bileduct,breast,head_and_neck,prostate, pancreas_gallbladder,ovary,cervical,renal,melanoma

SEQ ID NO: 478394 - DNA, 34 bp, Homo sapiens; identical to SEQ ID NO: 475623
  chr2:180725139-180725173
  hyper
  sarcoma vs. anorectal,multiple_myeloma,non_cancer, myeloid_neoplasm,thyroid

SEQ ID NO: 478395 - DNA, 72 bp, Homo sapiens; identical to SEQ ID NO: 453142
  chr2:182818959-182819031
  hyper
  sarcoma vs. renal,multiple_myeloma,lymphoid_neoplasm, non_cancer,thyroid,prostate,myeloid_neoplasm,liver_bileduct

SEQ ID NO: 478396 - DNA, 897 bp, Homo sapiens; identical to SEQ ID NO: 331573
  chr2:200320451-200321348
  hyper
  sarcoma vs. liver_bileduct,ovary,cervical,anorectal, bladder_and_urothelial,colorectal,renal

SEQ ID NO: 478397 - DNA, 173 bp, Homo sapiens; identical to SEQ ID NO: 331583
  chr2:206750391-206750564
  hyper
  sarcoma vs. liver_bileduct,lymphoid_neoplasm,prostate, bladder_and_urothelial,cervical,pancreas_gallbladder, multiple_myeloma,upper_gi,renal,breast,colorectal,non_cancer, myeloid_neoplasm,uterine,thyroid,melanoma

SEQ ID NO: 478398 - DNA, 229 bp, Homo sapiens; identical to SEQ ID NO: 331584
  chr2:206948646-206948875
  hyper
  sarcoma vs. melanoma,lung,upper_gi

SEQ ID NO: 478399 - DNA, 325 bp, Homo sapiens; identical to SEQ ID NO: 453144
  chr2:219232221-219232546
  hyper
  sarcoma vs. cervical,pancreas_gallbladder,colorectal

SEQ ID NO: 478400 - DNA, 32 bp, Homo sapiens; identical to SEQ ID NO: 357453
  chr2:219232859-219232891
  hyper
  sarcoma vs. cervical,pancreas_gallbladder,colorectal

SEQ ID NO: 478401 - DNA, 394 bp, Homo sapiens; identical to SEQ ID NO: 455913
  chr2:220348591-220348985
  hyper
  sarcoma vs. melanoma,multiple_myeloma,myeloid_neoplasm, bladder_and_urothelial,thyroid,prostate,non_cancer

SEQ ID NO: 478402 - DNA, 30 bp, Homo sapiens; identical to SEQ ID NO: 455914
  chr2:220348955-220348985
  hyper
  sarcoma vs. thyroid,melanoma,multiple_myeloma,prostate, non_cancer,bladder_and_urothelial

SEQ ID NO: 478403 - DNA, 2 bp, Homo sapiens
  chr2:220361418-220361420
  hyper
  sarcoma vs. ovary,bladder_and_urothelial,cervical
cg

SEQ ID NO: 478404 - DNA, 183 bp, Homo sapiens
  chr2:220361644-220361827
  hyper
  sarcoma vs. ovary,bladder_and_urothelial,cervical
ggacccattcatccgctggagtaaggacggcaaggagctacgtgacggtcccaagtaccgctacgtcttcgaggaccctgacgtggtggcactggtggtgcgcgacggcgagctggcagacctgggccagtacagcatcaacgtcaccaaccccttcggccagtgctccgactcggcgcgcat

SEQ ID NO: 478405 - DNA, 42 bp, Homo sapiens
  chr2:220361785-220361827
  hyper
  sarcoma vs. renal,bladder_and_urothelial,ovary
cgtcaccaaccccttcggccagtgctccgactcggcgcgcat

SEQ ID NO: 478406 - DNA, 52 bp, Homo sapiens
  chr2:220362349-220362401
  hyper
  sarcoma vs. renal,bladder_and_urothelial,ovary
ctgtatttagtgccgggtattagccggtgaggtgatgccctgcctcatctcc

SEQ ID NO: 478407 - DNA, 110 bp, Homo sapiens
  chr2:220362444-220362554
  hyper
  sarcoma vs. renal,bladder_and_urothelial,ovary
cgacgaagattcaaaagggacccgacaacactaaggcgcgcaaaggcaccaccgtgacgctgactgcggagatcctgggagagcctgcgcccgacgtaggctggaccaag

SEQ ID NO: 478408 - DNA, 249 bp, Homo sapiens; identical to SEQ ID NO: 369946
  chr2:220377743-220377992
  hyper
  sarcoma vs. lung

SEQ ID NO: 478409 - DNA, 99 bp, Homo sapiens
  chr2:220378995-220379094
  hyper
  sarcoma vs. cervical,bladder_and_urothelial,anorectal, lung,uterine
cgcccgtgctgccggtgaaacgctgttgacatgtcctgaattattaagcgtggggagggctccggagcacatgctgagcggagcggctggggctgcgcg

SEQ ID NO: 478410 - DNA, 285 bp, Homo sapiens; identical to SEQ ID NO: 469021
  chr2:223171556-223171841
  hyper
  sarcoma vs. ovary

SEQ ID NO: 478411 - DNA, 913 bp, Homo sapiens; identical to SEQ ID NO: 349692
  chr2:223289375-223290288
  hyper
  sarcoma vs. anorectal,pancreas_gallbladder,head_and_neck

SEQ ID NO: 478412 - DNA, 163 bp, Homo sapiens; identical to SEQ ID NO: 331637
  chr2:224702626-224702789
  hyper
  sarcoma vs. lung,head_and_neck,liver_bileduct, lymphoid_neoplasm,ovary,upper_gi,uterine,pancreas_gallbladder, breast,bladder_and_urothelial,prostate,multiple_myeloma, colorectal,cervical,anorectal,non_cancer,renal,thyroid

SEQ ID NO: 478413 - DNA, 165 bp, Homo sapiens; identical to SEQ ID NO: 357503
  chr2:235404971-235405136
  hyper
  sarcoma vs. cervical,lung,anorectal,head_and_neck

SEQ ID NO: 478414 - DNA, 2 bp, Homo sapiens
  chr2:241393134-241393136
  hyper
  sarcoma vs. myeloid_neoplasm,uterine,breast,thyroid, prostate
cg

SEQ ID NO: 478415 - DNA, 112 bp, Homo sapiens; identical to SEQ ID NO: 357518
  chr2:241393469-241393581
  hyper
  sarcoma vs. myeloid_neoplasm,uterine,breast,thyroid, prostate

SEQ ID NO: 478416 - DNA, 17 bp, Homo sapiens
  chr20:2668754-2668771
  hyper
  sarcoma vs. multiple_myeloma,thyroid, bladder_and_urothelial,non_cancer,lymphoid_neoplasm
cggggatctgacaggaa

SEQ ID NO: 478417 - DNA, 121 bp, Homo sapiens; identical to SEQ ID NO: 453152
  chr20:2731109-2731230
  hyper
  sarcoma vs. multiple_myeloma,colorectal, bladder_and_urothelial,non_cancer,upper_gi,renal

SEQ ID NO: 478418 - DNA, 226 bp, Homo sapiens; identical to SEQ ID NO: 453153
  chr20:2731391-2731617
  hyper
  sarcoma vs. multiple_myeloma,colorectal, bladder_and_urothelial,non_cancer,upper_gi,renal

SEQ ID NO: 478419 - DNA, 331 bp, Homo sapiens; identical to SEQ ID NO: 453154
  chr20:2731675-2732006
  hyper
  sarcoma vs. multiple_myeloma,colorectal, bladder_and_urothelial,non_cancer,upper_gi,renal

SEQ ID NO: 478420 - DNA, 89 bp, Homo sapiens
  chr20:2731528-2731617
  hyper
  sarcoma vs. colorectal,pancreas_gallbladder,cervical, multiple_myeloma,upper_gi
cgatccccagaagtgagtgctttctctttgccgggaaactaaaggaaatccactaagtcaggatcagaggtgaaggtagggctctgaga

SEQ ID NO: 478421 - DNA, 744 bp, Homo sapiens; identical to SEQ ID NO: 345622
  chr20:2731675-2732419
  hyper
  sarcoma vs. colorectal,pancreas_gallbladder,cervical, multiple_myeloma,upper_gi

SEQ ID NO: 478422 - DNA, 450 bp, Homo sapiens; identical to SEQ ID NO: 352450
  chr20:3653532-3653982
  hyper
  sarcoma vs. breast,head_and_neck,renal,prostate, non_cancer,cervical,lung,melanoma,bladder_and_urothelial, myeloid_neoplasm

SEQ ID NO: 478423 - DNA, 2 bp, Homo sapiens
  chr20:9487997-9487999
  hyper
  sarcoma vs. melanoma
ac

SEQ ID NO: 478424 - DNA, 211 bp, Homo sapiens; identical to SEQ ID NO: 472558
  chr20:9489214-9489425
  hyper
  sarcoma vs. melanoma

SEQ ID NO: 478425 - DNA, 211 bp, Homo sapiens; identical to SEQ ID NO: 472558
  chr20:9489214-9489425
  hyper
  sarcoma vs. melanoma

SEQ ID NO: 478426 - DNA, 66 bp, Homo sapiens; identical to SEQ ID NO: 352456
  chr20:9489716-9489782
  hyper
  sarcoma vs. melanoma

SEQ ID NO: 478427 - DNA, 736 bp, Homo sapiens; identical to SEQ ID NO: 347654
  chr20:10415352-10416088
  hyper
  sarcoma vs. ovary,upper_gi,renal,multiple_myeloma, prostate,breast,cervical,uterine,lung,colorectal, lymphoid_neoplasm,non_cancer,head_and_neck, bladder_and_urothelial,pancreas_gallbladder,liver_bileduct,
  CONT. FROM ABOVE: myeloid_neoplasm,thyroid

SEQ ID NO: 478428 - DNA, 95 bp, Homo sapiens; identical to SEQ ID NO: 347655
  chr20:17919868-17919963
  hyper
  sarcoma vs. upper_gi,multiple_myeloma,colorectal,lung, prostate,uterine,renal,lymphoid_neoplasm,cervical,non_cancer, pancreas_gallbladder

SEQ ID NO: 478429 - DNA, 86 bp, Homo sapiens; identical to SEQ ID NO: 361825
  chr20:19186796-19186882
  hyper
  sarcoma vs. bladder_and_urothelial,lymphoid_neoplasm, upper_gi,melanoma,renal

SEQ ID NO: 478430 - DNA, 78 bp, Homo sapiens; identical to SEQ ID NO: 336375
  chr20:19673407-19673485
  hyper
  sarcoma vs. melanoma,ovary,bladder_and_urothelial, head_and_neck,upper_gi,lymphoid_neoplasm,colorectal, pancreas_gallbladder,uterine,cervical,prostate,liver_bileduct, anorectal,breast,multiple_myeloma,lung,renal

SEQ ID NO: 478431 - DNA, 148 bp, Homo sapiens; identical to SEQ ID NO: 336377
  chr20:20343543-20343691
  hyper
  sarcoma vs. ovary,prostate,uterine,colorectal, myeloid_neoplasm,thyroid,non_cancer,renal,multiple_myeloma

SEQ ID NO: 478432 - DNA, 79 bp, Homo sapiens; identical to SEQ ID NO: 345625
  chr20:20350750-20350829
  hyper
  sarcoma vs. prostate,non_cancer,uterine,breast

SEQ ID NO: 478433 - DNA, 206 bp, Homo sapiens; identical to SEQ ID NO: 453161
  chr20:21080357-21080563
  hyper
  sarcoma vs. thyroid,non_cancer,colorectal

SEQ ID NO: 478434 - DNA, 585 bp, Homo sapiens; identical to SEQ ID NO: 455929
  chr20:30193272-30193857
  hyper
  sarcoma vs. lung,liver_bileduct,uterine,renal, pancreas_gallbladder,colorectal,multiple_myeloma,thyroid, cervical

SEQ ID NO: 478435 - DNA, 189 bp, Homo sapiens; identical to SEQ ID NO: 345629
  chr20:30193992-30194181
  hyper
  sarcoma vs. lung,liver_bileduct,uterine,renal, pancreas_gallbladder,colorectal,multiple_myeloma,thyroid, cervical

SEQ ID NO: 478436 - DNA, 262 bp, Homo sapiens; identical to SEQ ID NO: 336415
  chr20:30196349-30196611
  hyper
  sarcoma vs. ovary,lung,colorectal

SEQ ID NO: 478437 - DNA, 110 bp, Homo sapiens; identical to SEQ ID NO: 469045
  chr20:32899337-32899447
  hyper
  sarcoma vs. liver_bileduct,colorectal, pancreas_gallbladder,bladder_and_urothelial,upper_gi,cervical, lung,uterine,anorectal,breast,thyroid,non_cancer,head_and_neck, prostate

SEQ ID NO: 478438 - DNA, 339 bp, Homo sapiens; identical to SEQ ID NO: 294726
  chr20:32899515-32899854
  hyper
  sarcoma vs. liver_bileduct,colorectal, pancreas_gallbladder,bladder_and_urothelial,upper_gi,cervical, lung,uterine,anorectal,breast,thyroid,non_cancer,head_and_neck, prostate

SEQ ID NO: 478439 - DNA, 534 bp, Homo sapiens; identical to SEQ ID NO: 336423
  chr20:34652354-34652888
  hyper
  sarcoma vs. cervical,lung,pancreas_gallbladder, multiple_myeloma,colorectal,renal,anorectal,breast, bladder_and_urothelial,upper_gi,prostate,head_and_neck, myeloid_neoplasm,thyroid

SEQ ID NO: 478440 - DNA, 142 bp, Homo sapiens; identical to SEQ ID NO: 464480
  chr20:35201323-35201465
  hyper
  sarcoma vs. ovary,lymphoid_neoplasm,uterine, bladder_and_urothelial,non_cancer,cervical,anorectal, pancreas_gallbladder,multiple_myeloma,thyroid,upper_gi, colorectal,myeloid_neoplasm

SEQ ID NO: 478441 - DNA, 38 bp, Homo sapiens; identical to SEQ ID NO: 464481
  chr20:35201548-35201586
  hyper
  sarcoma vs. ovary,lymphoid_neoplasm,uterine, bladder_and_urothelial,non_cancer,cervical,anorectal, pancreas_gallbladder,multiple_myeloma,thyroid,upper_gi, colorectal,myeloid_neoplasm

SEQ ID NO: 478442 - DNA, 120 bp, Homo sapiens; identical to SEQ ID NO: 347672
  chr20:35201647-35201767
  hyper
  sarcoma vs. ovary,lymphoid_neoplasm,uterine, bladder_and_urothelial,non_cancer,cervical,anorectal, pancreas_gallbladder,multiple_myeloma,thyroid,upper_gi, colorectal,myeloid_neoplasm

SEQ ID NO: 478443 - DNA, 92 bp, Homo sapiens; identical to SEQ ID NO: 467110
  chr20:39318786-39318878
  hyper
  sarcoma vs. thyroid

SEQ ID NO: 478444 - DNA, 71 bp, Homo sapiens; identical to SEQ ID NO: 345637
  chr20:44453063-44453134
  hyper
  sarcoma vs. prostate,thyroid,non_cancer,breast, pancreas_gallbladder,colorectal,uterine,cervical,upper_gi, bladder_and_urothelial,multiple_myeloma,renal

SEQ ID NO: 478445 - DNA, 126 bp, Homo sapiens
  chr20:48098999-48099125
  hyper
  sarcoma vs. anorectal
cgtcatgcccgccggcatcgctgatccggccgcccccgccccccctgcccccccaggccgctgtcactcgacggcaaggcccgctgctgcgggggaggggggcagggagcgctgtgggctgctggg

SEQ ID NO: 478446 - DNA, 289 bp, Homo sapiens
  chr20:48099573-48099862
  hyper
  sarcoma vs. anorectal
gggggagctgcatgaaaactttctttctttatctttttctttctttcttcttcttctttccttcttttttttttttttaacgagttctcttcttttccttccccttctcgagataatcaagattttgggggtgggggaatggcagcgggcttttttccaaatcttaaaagatttgggggaattccgggggttccaggtgcccacctgtccgaggtcacaacagacggggtgtgcacaacagcccctctgtcctggagcgacccctcttcccaaacactggagcatctcc

SEQ ID NO: 478447 - DNA, 16 bp, Homo sapiens
  chr20:48099891-48099907
  hyper
  sarcoma vs. anorectal
cgaggaggaaaagccc

SEQ ID NO: 478448 - DNA, 982 bp, Homo sapiens; identical to SEQ ID NO: 336464
  chr20:48598700-48599682
  hyper
  sarcoma vs. cervical,uterine,lung,ovary,anorectal,breast, colorectal,prostate,upper_gi,bladder_and_urothelial,non_cancer, head_and_neck,thyroid

SEQ ID NO: 478449 - DNA, 952 bp, Homo sapiens; identical to SEQ ID NO: 336473
  chr20:50158723-50159675
  hyper
  sarcoma vs. myeloid_neoplasm,prostate,uterine,upper_gi, lung,breast,ovary,multiple_myeloma,renal,pancreas_gallbladder, non_cancer,liver_bileduct,colorectal,bladder_and_urothelial, lymphoid_neoplasm,cervical,thyroid

SEQ ID NO: 478450 - DNA, 571 bp, Homo sapiens; identical to SEQ ID NO: 467112
  chr20:50383675-50384246
  hyper
  sarcoma vs. liver_bileduct

SEQ ID NO: 478451 - DNA, 85 bp, Homo sapiens; identical to SEQ ID NO: 345642
  chr20:50384400-50384485
  hyper
  sarcoma vs. liver_bileduct

SEQ ID NO: 478452 - DNA, 372 bp, Homo sapiens; identical to SEQ ID NO: 336479
  chr20:52259577-52259949
  hyper
  sarcoma vs. liver_bileduct,head_and_neck, lymphoid_neoplasm,bladder_and_urothelial,colorectal,anorectal, upper_gi,renal

SEQ ID NO: 478453 - DNA, 19 bp, Homo sapiens
  chr20:56725857-56725876
  hyper
  sarcoma vs. colorectal,multiple_myeloma,anorectal, cervical,myeloid_neoplasm,head_and_neck,non_cancer,ovary, uterine,lung,prostate,thyroid,renal
cggacccaagcgacgcggc

SEQ ID NO: 478454 - DNA, 117 bp, Homo sapiens; identical to SEQ ID NO: 352517
  chr20:56725940-56726057
  hyper
  sarcoma vs. colorectal,multiple_myeloma,anorectal, cervical,myeloid_neoplasm,head_and_neck,non_cancer,ovary, uterine,lung,prostate,thyroid,renal

SEQ ID NO: 478455 - DNA, 1 bp, Homo sapiens
  chr20:57224597-57224598
  hyper
  sarcoma vs. thyroid,myeloid_neoplasm,non_cancer, multiple_myeloma
c

SEQ ID NO: 478456 - DNA, 113 bp, Homo sapiens; identical to SEQ ID NO: 345643
  chr20:57225466-57225579
  hyper
  sarcoma vs. thyroid,myeloid_neoplasm,non_cancer, multiple_myeloma

SEQ ID NO: 478457 - DNA, 304 bp, Homo sapiens; identical to SEQ ID NO: 336497
  chr20:57227604-57227908
  hyper
  sarcoma vs. melanoma,liver_bileduct,lymphoid_neoplasm

SEQ ID NO: 478458 - DNA, 218 bp, Homo sapiens; identical to SEQ ID NO: 336516
  chr20:62127516-62127734
  hyper
  sarcoma vs. head_and_neck

SEQ ID NO: 478459 - DNA, 390 bp, Homo sapiens; identical to SEQ ID NO: 347694
  chr20:62273399-62273789
  hyper
  sarcoma vs. breast,ovary,lung,cervical,head_and_neck, upper_gi,liver_bileduct,anorectal,prostate,colorectal, pancreas_gallbladder,uterine,renal,multiple_myeloma, lymphoid_neoplasm,non_cancer,thyroid,bladder_and_urothelial,
  CONT. FROM ABOVE: melanoma

SEQ ID NO: 478460 - DNA, 291 bp, Homo sapiens
  chr20:62368779-62369070
  hyper
  sarcoma vs. head_and_neck,cervical,thyroid,non_cancer, pancreas_gallbladder
cgggagacgcaggagccccgcagccgcgggaggtgcagatttggggctgccaggtggcgccaggtccccttggccagcccccagcgcccctttcttctgtccccagggcctcggcttcacaggatggggctgccagtgtcctgggcccctcctgccctctgggttctagggtgctgcgccctgctcctctcgctgtgggcgctgtgcacagcctgccgcaggtaggtccctcagccgcgttctgtctggggcctcgctgcggctgccattcacagcccagcgcgggaaggg

SEQ ID NO: 478461 - DNA, 1 bp, Homo sapiens
  chr20:62463400-62463401
  hyper
  sarcoma vs. ovary,colorectal
c

SEQ ID NO: 478462 - DNA, 345 bp, Homo sapiens; identical to SEQ ID NO: 345646
  chr20:62495236-62495581
  hyper
  sarcoma vs. prostate,lymphoid_neoplasm,breast, myeloid_neoplasm,thyroid,head_and_neck,renal,colorectal, bladder_and_urothelial,upper_gi,cervical,non_cancer, pancreas_gallbladder,uterine,lung,multiple_myeloma,anorectal

SEQ ID NO: 478463 - DNA, 235 bp, Homo sapiens; identical to SEQ ID NO: 375207
  chr21:30670777-30671012
  hyper
  sarcoma vs. ovary

SEQ ID NO: 478464 - DNA, 301 bp, Homo sapiens
  chr21:34602438-34602739
  hyper
  sarcoma vs. liver_bileduct,upper_gi,breast,renal, colorectal,uterine
cgcgagcgtcgggtcccagagccgggcgcggctggggcccgaggctagcatctctcgggagccgcaaggcgagagctgcaaaggtaacgcagcgtggcggggtcgcgggagcggagcgcgtggccagctgactggagggaaaacgccgcctccctgcagcggttcccggaatcccctccggttccctctcgctctccccgactcctcctcctcctcctgccctccctctgcgtcttgagtatgcggctagtgcgcccttcctctctcccggggccgcacctgcgaccccaggacccctccc

SEQ ID NO: 478465 - DNA, 613 bp, Homo sapiens; identical to SEQ ID NO: 352549
  chr21:34602763-34603376
  hyper
  sarcoma vs. liver_bileduct,upper_gi,breast,renal, colorectal,uterine

SEQ ID NO: 478466 - DNA, 293 bp, Homo sapiens; identical to SEQ ID NO: 336563
  chr21:38382182-38382475
  hyper
  sarcoma vs. liver_bileduct,melanoma,pancreas_gallbladder, renal,colorectal,prostate,upper_gi,anorectal,cervical, non_cancer,head_and_neck,uterine,multiple_myeloma,lung, myeloid_neoplasm,thyroid,breast,lymphoid_neoplasm

SEQ ID NO: 478467 - DNA, 76 bp, Homo sapiens
  chr21:40105869-40105945
  hyper
  sarcoma vs. uterine,pancreas_gallbladder, myeloid_neoplasm,prostate,colorectal,renal,anorectal,non_cancer, upper_gi,breast
cgaaaatatctgtcatcgtcactttacagaaaatggaaaaggatgaggattgcacaaaaactagaaattccatccc

SEQ ID NO: 478468 - DNA, 342 bp, Homo sapiens
  chr21:40105997-40106339
  hyper
  sarcoma vs. uterine,pancreas_gallbladder, myeloid_neoplasm,prostate,colorectal,renal,anorectal,non_cancer, upper_gi,breast
cggtggcgctcgaggcaaacggtgtcatgaaacggtcactggatgcactgaccctgaagatgctctcaaagcacgagtccgttcatcagagagtggacttgacacccatcagaaacattcccggagtgcgttggtgtgaaggtgcgaggagagtcggggaagcatcccgaagccctgctaggcgaatgggtactgctgagattacagggtcagcacaaagcagaatacaggacccgaaaataacagctgcaccggaagaatacttgaccactgtttaagaaggaatttgacgaagagcagtcaccgagtgcagccctgggccggctaaaggaaaagaaaaaa

SEQ ID NO: 478469 - DNA, 9 bp, Homo sapiens
  chr21:40106368-40106377
  hyper
  sarcoma vs. uterine,pancreas_gallbladder, myeloid_neoplasm,prostate,colorectal,renal,anorectal,non_cancer, upper_gi,breast
atgccaggc

SEQ ID NO: 478470 - DNA, 603 bp, Homo sapiens; identical to SEQ ID NO: 336575
  chr21:43188777-43189380
  hyper
  sarcoma vs. liver_bileduct,pancreas_gallbladder,upper_gi, ovary,colorectal,prostate,renal

SEQ ID NO: 478471 - DNA, 273 bp, Homo sapiens; identical to SEQ ID NO: 362015
  chr21:47649460-47649733
  hyper
  sarcoma vs. head_and_neck,lung,liver_bileduct,upper_gi, prostate,colorectal

SEQ ID NO: 478472 - DNA, 10 bp, Homo sapiens
  chr22:19711681-19711691
  hyper
  sarcoma vs. anorectal,uterine,renal,ovary, bladder_and_urothelial,non_cancer,thyroid
ggccgccccg

SEQ ID NO: 478473 - DNA, 608 bp, Homo sapiens
  chr22:27299049-27299657
  hyper
  sarcoma vs. renal
tcctgagcggctattttgagagcgatggaggggagagggtattagattcctgaccttgaggtcggggaggggagggtgatgctagtggtggacgaaagacttgaagataatgagaaattgcatcaactttacccaggctgtttctgggtctagaagcaagcaaaaataaggcgggagcgggtggggggaagaaaaagaggcatttattttggagccgtatcggaagcacaagtgtcatgggctgaaaggccgccttctcctgcgggctaagggtgtgggcgacagctcgcacattcaaataagggagcgattacacggcgcttgcttctgaagacggatttcctggtagggggagcgggcgggggggctgggccggtgtaaaggggacggcaacattaggctttggcaagttaattagggttcaggagtccagcgagcgagcagggggagaggctggatttgcataaatccatttacataatgttcttcacaaattgtgcagccagaaggcagggagggggtggggagggaaagggctggggagggggaggtggttagacgcccgaggcagccgccgccaaagggggaagggcgaggcccgagatggg

SEQ ID NO: 478474 - DNA, 38 bp, Homo sapiens
  chr22:27299689-27299727
  hyper
  sarcoma vs. renal
ctgctcttgtctgcaccagggccacccctgcctatctc

SEQ ID NO: 478475 - DNA, 259 bp, Homo sapiens
  chr22:29426301-29426560
  hyper
  sarcoma vs. ovary,breast,bladder_and_urothelial
cgccgcgacccggccgcggactccagcctctaaagtcgggtacctttaattaggagaaattaagtggggctgctacatattttgagaataagtaacactatttaaacttaggcagccttaaccactaacttaaccgctgaattctcgctgctacatgtctcctaaatagatcagcataatcttaactaggacttaaaatgcatcatcttcgttccggaactcagaacctgcagccgacgggagcctttggaggcttaat

SEQ ID NO: 478476 - DNA, 219 bp, Homo sapiens; identical to SEQ ID NO: 362050
  chr22:29426653-29426872
  hyper
  sarcoma vs. ovary,breast,bladder_and_urothelial

SEQ ID NO: 478477 - DNA, 123 bp, Homo sapiens; identical to SEQ ID NO: 362064
  chr22:38966046-38966169
  hyper
  sarcoma vs. lymphoid_neoplasm

SEQ ID NO: 478478 - DNA, 332 bp, Homo sapiens; identical to SEQ ID NO: 336651
  chr22:41418641-41418973
  hyper
  sarcoma vs. upper_gi,lung,anorectal, bladder_and_urothelial,head_and_neck,melanoma,ovary,thyroid, uterine,colorectal,breast,cervical,renal,prostate,non_cancer, myeloid_neoplasm,multiple_myeloma,pancreas_gallbladder,
  CONT. FROM ABOVE: liver_bileduct

SEQ ID NO: 478479 - DNA, 14 bp, Homo sapiens
  chr22:42354024-42354038
  hyper
  sarcoma vs. multiple_myeloma,lymphoid_neoplasm, non_cancer,thyroid,pancreas_gallbladder
gcctgggccctccc

SEQ ID NO: 478480 - DNA, 1 bp, Homo sapiens
  chr22:42679388-42679389
  hyper
  sarcoma vs. bladder_and_urothelial,multiple_myeloma
c

SEQ ID NO: 478481 - DNA, 554 bp, Homo sapiens; identical to SEQ ID NO: 467179
  chr22:45097777-45098331
  hyper
  sarcoma vs. melanoma,ovary,lung,pancreas_gallbladder, renal,uterine,upper_gi

SEQ ID NO: 478482 - DNA, 254 bp, Homo sapiens; identical to SEQ ID NO: 467180
  chr22:45098381-45098635
  hyper
  sarcoma vs. melanoma,ovary,lung,pancreas_gallbladder, renal,uterine,upper_gi

SEQ ID NO: 478483 - DNA, 221 bp, Homo sapiens; identical to SEQ ID NO: 345667
  chr22:47199299-47199520
  hyper
  sarcoma vs. uterine,upper_gi,lymphoid_neoplasm, pancreas_gallbladder,ovary,breast,renal,cervical, bladder_and_urothelial,head_and_neck,prostate,multiple_myeloma, liver_bileduct,colorectal,non_cancer,lung,anorectal,thyroid

SEQ ID NO: 478484 - DNA, 275 bp, Homo sapiens; identical to SEQ ID NO: 336680
  chr22:50690042-50690317
  hyper
  sarcoma vs. pancreas_gallbladder,upper_gi

SEQ ID NO: 478485 - DNA, 232 bp, Homo sapiens; identical to SEQ ID NO: 475668
  chr3:5018754-5018986
  hyper
  sarcoma vs. melanoma,breast,bladder_and_urothelial, multiple_myeloma,renal,lymphoid_neoplasm,myeloid_neoplasm, colorectal,non_cancer,liver_bileduct,uterine,upper_gi, pancreas_gallbladder,cervical

SEQ ID NO: 478486 - DNA, 143 bp, Homo sapiens; identical to SEQ ID NO: 345077
  chr3:5019132-5019275
  hyper
  sarcoma vs. melanoma,breast,bladder_and_urothelial, multiple_myeloma,renal,lymphoid_neoplasm,myeloid_neoplasm, colorectal,non_cancer,liver_bileduct,uterine,upper_gi, pancreas_gallbladder,cervical

SEQ ID NO: 478487 - DNA, 4 bp, Homo sapiens
  chr3:9904708-9904712
  hyper
  sarcoma vs. bladder_and_urothelial
ggcc

SEQ ID NO: 478488 - DNA, 99 bp, Homo sapiens
  chr3:13009355-13009454
  hyper
  sarcoma vs. melanoma,ovary,head_and_neck,renal
cgtggccacacggcgccgcggaagaagcacagggggcggggggtcaggggcggggcgtcaggggcggggctacgcgcaggggcggggccgagccgaggc

SEQ ID NO: 478489 - DNA, 51 bp, Homo sapiens
  chr3:13009475-13009526
  hyper
  sarcoma vs. melanoma,ovary,head_and_neck,renal
cggagtcccagacactgcatccaggtcccagcgcgcgaagcctctgttctg

SEQ ID NO: 478490 - DNA, 896 bp, Homo sapiens; identical to SEQ ID NO: 349736
  chr3:13461404-13462300
  hyper
  sarcoma vs. lymphoid_neoplasm,breast, bladder_and_urothelial,multiple_myeloma,anorectal, pancreas_gallbladder,prostate,lung,liver_bileduct,cervical, uterine,head_and_neck

SEQ ID NO: 478491 - DNA, 269 bp, Homo sapiens; identical to SEQ ID NO: 331711
  chr3:23957838-23958107
  hyper
  sarcoma vs. melanoma

SEQ ID NO: 478492 - DNA, 989 bp, Homo sapiens; identical to SEQ ID NO: 331712
  chr3:24536360-24537349
  hyper
  sarcoma vs. liver_bileduct,uterine,pancreas_gallbladder, cervical,prostate,anorectal,breast,lung,head_and_neck,renal, thyroid,ovary,bladder_and_urothelial,upper_gi,colorectal, non_cancer,multiple_myeloma,myeloid_neoplasm

SEQ ID NO: 478493 - DNA, 220 bp, Homo sapiens
  chr3:26665682-26665902
  hyper
  sarcoma vs. melanoma
gaagcaaacaaacctccccgcgagaatctgaatgcgttggcatcttgggtggtgactgaatggtcagatcgtggactagggatgcttctccaagctctaagaggaccatagtctgctctcttctctggcacccgcttgcttctacgctccttcacctctgcagccaggtcggtagacccacgcccaccttccctgccaggcactcaggagtcaaggatgt

SEQ ID NO: 478494 - DNA, 215 bp, Homo sapiens
  chr3:27410391-27410606
  hyper
  sarcoma vs. prostate,thyroid,colorectal,non_cancer,renal, bladder_and_urothelial,multiple_myeloma,lung,anorectal,breast
cgtcggagcagattggaagagacacattcaggctccatttaaccagaataattccgttatcaaaatggaagcgccaagaagcatcgttgatggcgctttcccaccatccatccgtccaacacaaacccacctgctttgaaaagactgcctcacgcagtgactcacttacccaccacagccgcattctctacctctgcctcttgtctagtgaagct

SEQ ID NO: 478495 - DNA, 61 bp, Homo sapiens; identical to SEQ ID NO: 346550
  chr3:27411079-27411140
  hyper
  sarcoma vs. prostate,thyroid,colorectal,non_cancer,renal, bladder_and_urothelial,multiple_myeloma,lung,anorectal,breast

SEQ ID NO: 478496 - DNA, 167 bp, Homo sapiens; identical to SEQ ID NO: 331742
  chr3:41240162-41240329
  hyper
  sarcoma vs. lung

SEQ ID NO: 478497 - DNA, 9 bp, Homo sapiens
  chr3:45188139-45188148
  hyper
  sarcoma vs. upper_gi,lung
gcgaaggtc

SEQ ID NO: 478498 - DNA, 786 bp, Homo sapiens; identical to SEQ ID NO: 457991
  chr3:67048291-67049077
  hyper
  sarcoma vs. lymphoid_neoplasm

SEQ ID NO: 478499 - DNA, 153 bp, Homo sapiens; identical to SEQ ID NO: 455973
  chr3:72149806-72149959
  hyper
  sarcoma vs. lymphoid_neoplasm

SEQ ID NO: 478500 - DNA, 96 bp, Homo sapiens; identical to SEQ ID NO: 349792
  chr3:72150077-72150173
  hyper
  sarcoma vs. lymphoid_neoplasm

SEQ ID NO: 478501 - DNA, 832 bp, Homo sapiens; identical to SEQ ID NO: 345097
  chr3:113251180-113252012
  hyper
  sarcoma vs. cervical,uterine

SEQ ID NO: 478502 - DNA, 103 bp, Homo sapiens
  chr3:124606483-124606586
  hyper
  sarcoma vs. melanoma,upper_gi,pancreas_gallbladder, head_and_neck,breast,cervical,ovary,prostate,anorectal, colorectal
cgctcccgttgcttagccgcccgtcgccacgggaaaggggcggggcacgctgtattaggcgagccgagattacttgggccaaaggcggttgctagactgcgag

SEQ ID NO: 478503 - DNA, 15 bp, Homo sapiens
  chr3:142837817-142837832
  hyper
  sarcoma vs. ovary,myeloid_neoplasm
cgggacaagtatttt

SEQ ID NO: 478504 - DNA, 61 bp, Homo sapiens
  chr3:147088567-147088628
  hyper
  sarcoma vs. prostate
aaaaaaaaaaaaaaaaaaaaaaactcagggaaagtttgcttttgatgaattcaataaaagc

SEQ ID NO: 478505 - DNA, 100 bp, Homo sapiens; identical to SEQ ID NO: 357716
  chr3:147088653-147088753
  hyper
  sarcoma vs. prostate

SEQ ID NO: 478506 - DNA, 148 bp, Homo sapiens
  chr3:147108619-147108767
  hyper
  sarcoma vs. prostate
cggaggcggcggcggcagcagcagggccaggtggtagctcggggctgaggatcgcggcgggggcagccgctatggggcccaagccctgacacacgtaccattcgctcaagtcggcggtacgcgccgccaccgccgccgaggaggccac

SEQ ID NO: 478507 - DNA, 347 bp, Homo sapiens; identical to SEQ ID NO: 455989
  chr3:147138422-147138769
  hyper
  sarcoma vs. myeloid_neoplasm,thyroid,prostate,non_cancer

SEQ ID NO: 478508 - DNA, 4 bp, Homo sapiens
  chr3:147141258-147141262
  hyper
  sarcoma vs. prostate
cgcc

SEQ ID NO: 478509 - DNA, 8 bp, Homo sapiens
  chr3:147142382-147142390
  hyper
  sarcoma vs. anorectal
cgcccggc

SEQ ID NO: 478510 - DNA, 24 bp, Homo sapiens
  chr3:157217126-157217150
  hyper
  sarcoma vs. breast,cervical,head_and_neck,anorectal, uterine,upper_gi,myeloid_neoplasm,thyroid,liver_bileduct, prostate,bladder_and_urothelial,non_cancer,colorectal,ovary, multiple_myeloma,pancreas_gallbladder,renal
cgcaaaacgtggcacatttcaggg

SEQ ID NO: 478511 - DNA, 523 bp, Homo sapiens; identical to SEQ ID NO: 345110
  chr3:157217201-157217724
  hyper
  sarcoma vs. breast,cervical,head_and_neck,anorectal, uterine,upper_gi,myeloid_neoplasm,thyroid,liver_bileduct, prostate,bladder_and_urothelial,non_cancer,colorectal,ovary, multiple_myeloma,pancreas_gallbladder,renal

SEQ ID NO: 478512 - DNA, 259 bp, Homo sapiens; identical to SEQ ID NO: 469157
  chr3:157815399-157815658
  hyper
  sarcoma vs. thyroid,prostate,multiple_myeloma, bladder_and_urothelial,non_cancer,colorectal,myeloid_neoplasm, ovary,pancreas_gallbladder,uterine,anorectal,breast, lymphoid_neoplasm,renal,upper_gi,cervical,lung,liver_bileduct

SEQ ID NO: 478513 - DNA, 68 bp, Homo sapiens; identical to SEQ ID NO: 469158
  chr3:157815822-157815890
  hyper
  sarcoma vs. thyroid,prostate,multiple_myeloma, bladder_and_urothelial,non_cancer,colorectal,myeloid_neoplasm, ovary,pancreas_gallbladder,uterine,anorectal,breast, lymphoid_neoplasm,renal,upper_gi,cervical,lung,liver_bileduct

SEQ ID NO: 478514 - DNA, 266 bp, Homo sapiens; identical to SEQ ID NO: 469159
  chr3:157815923-157816189
  hyper
  sarcoma vs. thyroid,prostate,multiple_myeloma, bladder_and_urothelial,non_cancer,colorectal,myeloid_neoplasm, ovary,pancreas_gallbladder,uterine,anorectal,breast, lymphoid_neoplasm,renal,upper_gi,cervical,lung,liver_bileduct

SEQ ID NO: 478515 - DNA, 68 bp, Homo sapiens; identical to SEQ ID NO: 469158
  chr3:157815822-157815890
  hyper
  sarcoma vs. colorectal,bladder_and_urothelial, myeloid_neoplasm,non_cancer,thyroid,uterine, pancreas_gallbladder,prostate,multiple_myeloma, lymphoid_neoplasm,ovary,anorectal,renal,breast,upper_gi,
  CONT. FROM ABOVE: cervical,lung,liver_bileduct

SEQ ID NO: 478516 - DNA, 568 bp, Homo sapiens; identical to SEQ ID NO: 345113
  chr3:157815923-157816491
  hyper
  sarcoma vs. colorectal,bladder_and_urothelial, myeloid_neoplasm,non_cancer,thyroid,uterine, pancreas_gallbladder,prostate,multiple_myeloma, lymphoid_neoplasm,ovary,anorectal,renal,breast,upper_gi,
  CONT. FROM ABOVE: cervical,lung,liver_bileduct

SEQ ID NO: 478517 - DNA, 201 bp, Homo sapiens; identical to SEQ ID NO: 370270
  chr3:161089246-161089447
  hyper

SEQ ID NO: 478518 - DNA, 21 bp, Homo sapiens
  chr3:169480958-169480979
  hyper
  sarcoma vs. lymphoid_neoplasm,bladder_and_urothelial, colorectal,breast,upper_gi,anorectal,renal,prostate, multiple_myeloma,uterine,liver_bileduct,non_cancer, pancreas_gallbladder,lung,cervical
agtccccgcacggtggctcac

SEQ ID NO: 478519 - DNA, 253 bp, Homo sapiens; identical to SEQ ID NO: 357777
  chr3:184322331-184322584
  hyper
  sarcoma vs. ovary

SEQ ID NO: 478520 - DNA, 43 bp, Homo sapiens; identical to SEQ ID NO: 331974
  chr3:185977478-185977521
  hyper
  sarcoma vs. upper_gi,liver_bileduct,lung, bladder_and_urothelial,breast,cervical,pancreas_gallbladder, renal,lymphoid_neoplasm,anorectal,prostate,melanoma,colorectal, uterine,non_cancer,ovary,head_and_neck

SEQ ID NO: 478521 - DNA, 59 bp, Homo sapiens; identical to SEQ ID NO: 331980
  chr3:190231330-190231389
  hyper
  sarcoma vs. liver_bileduct

SEQ ID NO: 478522 - DNA, 14 bp, Homo sapiens
  chr3:193858590-193858604
  hyper
  sarcoma vs. liver_bileduct
cggcctcgggcaca

SEQ ID NO: 478523 - DNA, 247 bp, Homo sapiens
  chr3:193858636-193858883
  hyper
  sarcoma vs. liver_bileduct
ctgatcgctcggggagataaggcacgactccaaactgcgtccggatgcgggccgcgggccccggctgccgcgcgcattagcctctcaatggagcccttccggggccccggccccccgccgtctccagcagcatccggagcgggaaaggcgccgaactggaagggggtgggggtgctcttcggtcaacacgagagccctctccaagcgcagaagcgcgactccggaggctcgcccctcctcgcgcccc

SEQ ID NO: 478524 - DNA, 261 bp, Homo sapiens; identical to SEQ ID NO: 370326
  chr3:193858949-193859210
  hyper
  sarcoma vs. liver_bileduct

SEQ ID NO: 478525 - DNA, 643 bp, Homo sapiens; identical to SEQ ID NO: 331998
  chr3:197025639-197026282
  hyper
  sarcoma vs. lung,head_and_neck,breast,ovary,upper_gi, uterine,pancreas_gallbladder,bladder_and_urothelial,prostate, colorectal,lymphoid_neoplasm,renal,cervical,multiple_myeloma, myeloid_neoplasm,thyroid,non_cancer,anorectal,liver_bileduct

SEQ ID NO: 478526 - DNA, 112 bp, Homo sapiens
  chr4:4868273-4868385
  hyper
  sarcoma vs. melanoma
cgcaaaggactgcagctcagagaggtgacatggttttcccaaggttacacagttaatgaaggacatagcaggaattccaacacggattccactcgaggatccggtttttccc

SEQ ID NO: 478527 - DNA, 74 bp, Homo sapiens
  chr4:4868464-4868538
  hyper
  sarcoma vs. melanoma
cggagcgcagaatccgggaactagttctgaatttaactccttgcgctctaaccacgaacaggcactgtcccttg

SEQ ID NO: 478528 - DNA, 4 bp, Homo sapiens
  chr4:4869524-4869528
  hyper
  sarcoma vs. thyroid,ovary,renal
cacc

SEQ ID NO: 478529 - DNA, 461 bp, Homo sapiens
  chr4:4870855-4871316
  hyper
  sarcoma vs. melanoma
cgcaccagcggggtgcaataaagatcggcctttgtgtgtgtgtggtgggggggaggagtggggggtaggtagttaaaagcgaattcaaaagcccgccctcaatttggggcctgattaggggcagatggaaggaagggtccccgaccctacgtggcagcctttgttgcacattttacaggcgaggagacagtggtgggatccaagcccgctgctgtgggacctcaggagttgctttctccttcaccagctgggtgcagattttgatgatgcacagggcgcggcctgacagtgcgtgtgtgcgcccaccgggcgctgctgccagagtttgcggggttcagggagcgggaggagggtctgagagaccccaaagcctcccctttgcgagaccactccttgcttcccccgcctggcgctttccataaccctctgcggcgccctgcctctttgttgccccttagatg

SEQ ID NO: 478530 - DNA, 265 bp, Homo sapiens; identical to SEQ ID NO: 357818
  chr4:4871384-4871649
  hyper
  sarcoma vs. melanoma

SEQ ID NO: 478531 - DNA, 978 bp, Homo sapiens; identical to SEQ ID NO: 349904
  chr4:4873696-4874674
  hyper
  sarcoma vs. liver_bileduct,melanoma,renal,prostate, upper_gi,head_and_neck,bladder_and_urothelial,breast, pancreas_gallbladder,colorectal,lung,anorectal

SEQ ID NO: 478532 - DNA, 89 bp, Homo sapiens; identical to SEQ ID NO: 464537
  chr4:8201024-8201113
  hyper
  sarcoma vs. melanoma,renal,anorectal,multiple_myeloma, thyroid,uterine,prostate,liver_bileduct,colorectal, myeloid_neoplasm,non_cancer,pancreas_gallbladder,breast, cervical,ovary,lymphoid_neoplasm,upper_gi,
  CONT. FROM ABOVE: bladder_and_urothelial

SEQ ID NO: 478533 - DNA, 39 bp, Homo sapiens; identical to SEQ ID NO: 464538
  chr4:8201450-8201489
  hyper
  sarcoma vs. melanoma,renal,anorectal,multiple_myeloma, thyroid,uterine,prostate,liver_bileduct,colorectal, myeloid_neoplasm,non_cancer,pancreas_gallbladder,breast, cervical,ovary,lymphoid_neoplasm,upper_gi,
  CONT. FROM ABOVE: bladder_and_urothelial

SEQ ID NO: 478534 - DNA, 2 bp, Homo sapiens
  chr4:13543524-13543526
  hyper
  sarcoma vs. myeloid_neoplasm,non_cancer
cg

SEQ ID NO: 478535 - DNA, 28 bp, Homo sapiens
  chr4:13543536-13543564
  hyper
  sarcoma vs. myeloid_neoplasm,non_cancer
tgcaggctacagcctacagctgtcagcg

SEQ ID NO: 478536 - DNA, 141 bp, Homo sapiens
  chr4:16228990-16229131
  hyper
  sarcoma vs. liver_bileduct
cgagcgtggtgtcgagaccaccaccagctggggcggtgggagcgaaggtgccccaggctcggggaaggtggaaaccttttccccgctccccaagtgattgttgcgcgctccggtgaggggacagtggtacctcgatttccc

SEQ ID NO: 478537 - DNA, 273 bp, Homo sapiens; identical to SEQ ID NO: 357845
  chr4:16229202-16229475
  hyper
  sarcoma vs. liver_bileduct

SEQ ID NO: 478538 - DNA, 112 bp, Homo sapiens; identical to SEQ ID NO: 332062
  chr4:25235368-25235480
  hyper
  sarcoma vs. liver_bileduct

SEQ ID NO: 478539 - DNA, 786 bp, Homo sapiens
  chr4:36245423-36246209
  hyper
  sarcoma vs. liver_bileduct,ovary,pancreas_gallbladder, colorectal
cggggcagcacagacacccgggcaaattcatgatctctaccgagtaaataacttggtgcctgaaactcactacagcttcttcttatttaaaggtaggggagaggaatggagggagtgtccagctgtctatccggatcctcaccctcccgggtcaaatcccagaagtggagttcttggatcacttaccggcttctggtttcctttcagacgcccacacgcgggagcgaaatccaaggggcggacaccagagccgagcactttgcgctgaggaaatttacccggtgaagtgtcgaaaagccccagcccctccagacagggtcctcccacccccgcgtgggccatcccggcccagccttcccgaggccccgggtactcgccttgcgctcgggtcgcggagttcgaaaagcgaggtgaggcggcgctgggaagctcagcgccggcgtctctcccagccttgggcgctcggtcctcgcccctctgccggaggcgccaggcctcctctttcccggtccccgccggctgtccgcagtcgcctctgctgcctggcggcggccgcgcgggcggcgctgttagtggggccggcgtgtcgcggccgccgcacctggaggcggggagcgcgggccgcggacccgcgctcagctccggaaacgccgagcccggcgcccgcgccttgctcaggtgctcccgcgcctcgcctcggccgccgcttcctctccgcccgcgggggcggggagcaggcgccccgcgcgggggaagccggagctcaacggcgggggcggcccagcc

SEQ ID NO: 478540 - DNA, 131 bp, Homo sapiens; identical to SEQ ID NO: 349926
  chr4:36246257-36246388
  hyper
  sarcoma vs. liver_bileduct,ovary,pancreas_gallbladder, colorectal

SEQ ID NO: 478541 - DNA, 323 bp, Homo sapiens
  chr4:40632148-40632471
  hyper
  sarcoma vs. cervical,head_and_neck,breast,prostate, uterine,renal
cggccttgatggcagagattgggggacttgaccagacggacttctctccccgccccaaaagtcacatgcctttcagacacccagaagtggcacctgctccacctgggggcatctgtccgagtcagacgctcggcccccttcgggctgctccgagaaacccagccagaaccacgttggagaaattaggaacctgctgctgaatttcaagccgatcggaaccgccccgctccccttcttccccccataaacaagtcgctggacgaggtgggatctctgcgacccccgcgtgcccggggagagctcccggggcgagctcccggggc

SEQ ID NO: 478542 - DNA, 25 bp, Homo sapiens
  chr4:42401057-42401082
  hyper
  sarcoma vs. multiple_myeloma,uterine,thyroid,ovary
ctgacttcagagcggaataaatcac

SEQ ID NO: 478543 - DNA, 260 bp, Homo sapiens; identical to SEQ ID NO: 346640
  chr4:48271822-48272082
  hyper
  sarcoma vs. melanoma,liver_bileduct,ovary,renal,upper_gi, uterine,pancreas_gallbladder,breast,lung,lymphoid_neoplasm, colorectal,anorectal,cervical,prostate,multiple_myeloma

SEQ ID NO: 478544 - DNA, 189 bp, Homo sapiens
  chr4:48272084-48272273
  hyper
  sarcoma vs. melanoma,liver_bileduct,ovary,renal,upper_gi, uterine,pancreas_gallbladder,breast,lung,lymphoid_neoplasm, colorectal,anorectal,cervical,prostate,multiple_myeloma
tgagtttcagggagcgtcccttaggtttccgggggcggcgttgaacctccctagccccagtcttcccatcccaggagacccgcccctagtggctcgaacgcccctagccaggagagccccgagtagtgccacttgtggaagactacgtgcctgtcggaattaggaaccgcacctccccttccgctaagc

SEQ ID NO: 478545 - DNA, 173 bp, Homo sapiens; identical to SEQ ID NO: 475717
  chr4:54965627-54965800
  hyper
  sarcoma vs. ovary

SEQ ID NO: 478546 - DNA, 94 bp, Homo sapiens; identical to SEQ ID NO: 458065
  chr4:57687545-57687639
  hyper
  sarcoma vs. myeloid_neoplasm,ovary,lung,uterine, colorectal,head_and_neck,non_cancer

SEQ ID NO: 478547 - DNA, 205 bp, Homo sapiens; identical to SEQ ID NO: 346643
  chr4:57687887-57688092
  hyper
  sarcoma vs. myeloid_neoplasm,ovary,lung,uterine, colorectal,head_and_neck,non_cancer

SEQ ID NO: 478548 - DNA, 250 bp, Homo sapiens
  chr4:75230487-75230737
  hyper
  sarcoma vs. ovary
aggcatgtatggggaacgccagccttggctaaaagactgattcaagttatgtccgtcaccctgagcaaccaaaaccacccactacagggcaggtgaccccacaaagcaaaccaagccatctggtccacgctccccacctcccggagggagatggaaaagtttcgggagtagtccccggccaatcggaaagacattttttcattcctcaaccactactctcaggtgctccagggagggaggatgacttcct

SEQ ID NO: 478549 - DNA, 133 bp, Homo sapiens; identical to SEQ ID NO: 199452
  chr4:76555905-76556038
  hyper
  sarcoma vs. ovary,colorectal

SEQ ID NO: 478550 - DNA, 276 bp, Homo sapiens
  chr4:77818885-77819161
  hyper
  sarcoma vs. head_and_neck,liver_bileduct,upper_gi,lung, ovary,breast,renal,colorectal,pancreas_gallbladder,uterine, bladder_and_urothelial,anorectal,prostate,cervical
cgcgtcggggtctcggagaaagctcttgaagtggctcagcaaggcagcgttggtcacgcggcccccagcctggcacagaaagtccagtagtgcctcctggctcagctctcgggccatcgctgccttgtcctccgccccagaggtgtctgagtctcgccctcccggggctctccccagccagaggaaaccctggccgggcgagtgtcacctgcgcccggggcggcactagccgcccccatcagccgcggaggccagcgctgcccgcagcccgtgagc

SEQ ID NO: 478551 - DNA, 268 bp, Homo sapiens
  chr4:77819271-77819539
  hyper
  sarcoma vs. head_and_neck,liver_bileduct,upper_gi,lung, ovary,breast,renal,colorectal,pancreas_gallbladder,uterine, bladder_and_urothelial,anorectal,prostate,cervical
cgcaacgagtcctcacagcgaaagttcccgggatagggccgagtcggtttcacctgcgccctggcggcacctcctccctgcctctgggggaagggtcaggcccgcctcctcgtgtccctccgccccctgaggtctcccccaccccctgccacccatcccagaagagtcaggccggagagccagccggtaggtgaggttggcggcgaaccgagccggcagcgaactgctctgcggccggggaagtggaaggcaggtaggcgaccggccg

SEQ ID NO: 478552 - DNA, 142 bp, Homo sapiens; identical to SEQ ID NO: 349943
  chr4:77819573-77819715
  hyper
  sarcoma vs. head_and_neck,liver_bileduct,upper_gi,lung, ovary,breast,renal,colorectal,pancreas_gallbladder,uterine, bladder_and_urothelial,anorectal,prostate,cervical

SEQ ID NO: 478553 - DNA, 135 bp, Homo sapiens; identical to SEQ ID NO: 458074
  chr4:100729543-100729678
  hyper
  sarcoma vs. liver_bileduct,lymphoid_neoplasm,renal, upper_gi,pancreas_gallbladder,melanoma,multiple_myeloma, bladder_and_urothelial,anorectal,colorectal,prostate,breast, thyroid,non_cancer,uterine

SEQ ID NO: 478554 - DNA, 47 bp, Homo sapiens; identical to SEQ ID NO: 349961
  chr4:113432609-113432656
  hyper
  sarcoma vs. thyroid,myeloid_neoplasm

SEQ ID NO: 478555 - DNA, 5 bp, Homo sapiens
  chr4:113435438-113435443
  hyper
  sarcoma vs. ovary,bladder_and_urothelial,uterine, non_cancer,thyroid,head_and_neck
cgaac

SEQ ID NO: 478556 - DNA, 300 bp, Homo sapiens; identical to SEQ ID NO: 462855
  chr4:113435475-113435775
  hyper
  sarcoma vs. ovary,bladder_and_urothelial,uterine, non_cancer,thyroid,head_and_neck

SEQ ID NO: 478557 - DNA, 761 bp, Homo sapiens; identical to SEQ ID NO: 346652
  chr4:124317751-124318512
  hyper
  sarcoma vs. head_and_neck,lung,liver_bileduct, pancreas_gallbladder,ovary,renal,prostate,breast,colorectal, upper_gi,cervical,anorectal,uterine,myeloid_neoplasm, bladder_and_urothelial,non_cancer,multiple_myeloma,thyroid

SEQ ID NO: 478558 - DNA, 942 bp, Homo sapiens; identical to SEQ ID NO: 469199
  chr4:124318042-124318984
  hyper
  sarcoma vs. lung,liver_bileduct,colorectal,head_and_neck

SEQ ID NO: 478559 - DNA, 149 bp, Homo sapiens; identical to SEQ ID NO: 349977
  chr4:129210000-129210149
  hyper
  sarcoma vs. lung,head_and_neck,breast,renal,ovary, uterine,pancreas_gallbladder,colorectal,upper_gi,cervical, bladder_and_urothelial

SEQ ID NO: 478560 - DNA, 824 bp, Homo sapiens; identical to SEQ ID NO: 332200
  chr4:142557243-142558067
  hyper
  sarcoma vs. liver_bileduct,lung

SEQ ID NO: 478561 - DNA, 332 bp, Homo sapiens; identical to SEQ ID NO: 357975
  chr4:143768278-143768610
  hyper
  sarcoma vs. prostate,lung,breast,pancreas_gallbladder, myeloid_neoplasm,colorectal,ovary

SEQ ID NO: 478562 - DNA, 194 bp, Homo sapiens; identical to SEQ ID NO: 332204
  chr4:146098925-146099119
  hyper
  sarcoma vs. melanoma

SEQ ID NO: 478563 - DNA, 260 bp, Homo sapiens; identical to SEQ ID NO: 332209
  chr4:149362760-149363020
  hyper
  sarcoma vs. lung,pancreas_gallbladder,ovary, bladder_and_urothelial,colorectal,cervical,breast,anorectal, upper_gi,prostate,uterine,liver_bileduct

SEQ ID NO: 478564 - DNA, 177 bp, Homo sapiens; identical to SEQ ID NO: 332215
  chr4:153856957-153857134
  hyper
  sarcoma vs. head_and_neck,uterine,breast, pancreas_gallbladder,lung,anorectal,upper_gi,cervical,ovary, prostate,colorectal,myeloid_neoplasm,thyroid,multiple_myeloma, renal,non_cancer,bladder_and_urothelial

SEQ ID NO: 478565 - DNA, 20 bp, Homo sapiens
  chr4:154713481-154713501
  hyper
  sarcoma vs. myeloid_neoplasm,bladder_and_urothelial, breast,renal,non_cancer
cgttacatgtgcctcggtga

SEQ ID NO: 478566 - DNA, 192 bp, Homo sapiens; identical to SEQ ID NO: 350003
  chr4:154714010-154714202
  hyper
  sarcoma vs. myeloid_neoplasm,bladder_and_urothelial, breast,renal,non_cancer

SEQ ID NO: 478567 - DNA, 21 bp, Homo sapiens
  chr4:174438547-174438568
  hyper
  sarcoma vs. liver_bileduct
tcattgtgtgttttgccttta

SEQ ID NO: 478568 - DNA, 43 bp, Homo sapiens; identical to SEQ ID NO: 464561
  chr4:174439755-174439798
  hyper
  sarcoma vs. thyroid,prostate

SEQ ID NO: 478569 - DNA, 271 bp, Homo sapiens; identical to SEQ ID NO: 464562
  chr4:174440348-174440619
  hyper
  sarcoma vs. thyroid,prostate

SEQ ID NO: 478570 - DNA, 169 bp, Homo sapiens
  chr4:174448150-174448319
  hyper
  sarcoma vs. prostate,thyroid,bladder_and_urothelial, non_cancer
cgggatcccttaccacacgggagtgtcctcttcgtattaaaatatggaatgcttttcttcaaatatccactttttttttggagggggagacggggagcagatgcctcaaagggggtcaaagagaggggaaggaaattgcacataaataaaccggatgattccaaatgca

SEQ ID NO: 478571 - DNA, 355 bp, Homo sapiens; identical to SEQ ID NO: 358023
  chr4:174448663-174449018
  hyper
  sarcoma vs. prostate,thyroid,bladder_and_urothelial, non_cancer

SEQ ID NO: 478572 - DNA, 127 bp, Homo sapiens
  chr4:174458996-174459123
  hyper
  sarcoma vs. multiple_myeloma,liver_bileduct,melanoma, cervical,non_cancer,prostate,bladder_and_urothelial,renal, myeloid_neoplasm,thyroid,uterine
cgactctaggcaccccacgattagctgagtgatctagggcaaggacctaggcgtctctaagtcttagtttccccatctgaacaatgtggataatgacacgtacctggggtgggcaggctagagtaaa

SEQ ID NO: 478573 - DNA, 17 bp, Homo sapiens
  chr4:174459840-174459857
  hyper
  sarcoma vs. multiple_myeloma,liver_bileduct,melanoma, cervical,non_cancer,prostate,bladder_and_urothelial,renal, myeloid_neoplasm,thyroid,uterine
cagtatttcagccttgt

SEQ ID NO: 478574 - DNA, 17 bp, Homo sapiens
  chr4:174459840-174459857
  hyper
  sarcoma vs. myeloid_neoplasm,prostate
cagtatttcagccttgt

SEQ ID NO: 478575 - DNA, 35 bp, Homo sapiens; identical to SEQ ID NO: 358025
  chr4:174460221-174460256
  hyper
  sarcoma vs. myeloid_neoplasm,prostate

SEQ ID NO: 478576 - DNA, 468 bp, Homo sapiens; identical to SEQ ID NO: 332309
  chr5:10354870-10355338
  hyper
  sarcoma vs. lung,melanoma,ovary,lymphoid_neoplasm,breast, renal,uterine,upper_gi,head_and_neck,cervical,colorectal, prostate,anorectal,multiple_myeloma,pancreas_gallbladder, bladder_and_urothelial,non_cancer,myeloid_neoplasm

SEQ ID NO: 478577 - DNA, 96 bp, Homo sapiens
  chr5:10563418-10563514
  hyper
  sarcoma vs. anorectal
cgcccatccccggcgccaggactgacggggagagggcaaggccgggccagaggggctgtgggcctggactgcggctgtcgcccgcggccctgctct

SEQ ID NO: 478578 - DNA, 29 bp, Homo sapiens
  chr5:10563597-10563626
  hyper
  sarcoma vs. anorectal
gcatggggacggggagttcctcgtcgtcc

SEQ ID NO: 478579 - DNA, 253 bp, Homo sapiens
  chr5:16934300-16934553
  hyper
  sarcoma vs. melanoma,liver_bileduct,upper_gi,breast, renal,lymphoid_neoplasm,pancreas_gallbladder,anorectal
cgctgtagcgcgttatcctgatgttccccccacttgcactagggggcagagttctccccaagggggagccacggacccctgtggtgctcagacaggctacaggaggagtgagatccgtgcaaactgaatacaaatttctatattttcatcagattttctaagggacccagaacacaaaaacaacaaagttaagaatcattgccctaggggcagggcctccgttttcttacagatgcaagcaattaaacaccgg

SEQ ID NO: 478580 - DNA, 43 bp, Homo sapiens; identical to SEQ ID NO: 350045
  chr5:16934582-16934625
  hyper
  sarcoma vs. melanoma,liver_bileduct,upper_gi,breast, renal,lymphoid_neoplasm,pancreas_gallbladder,anorectal

SEQ ID NO: 478581 - DNA, 89 bp, Homo sapiens; identical to SEQ ID NO: 456018
  chr5:40680875-40680964
  hyper
  sarcoma vs. lymphoid_neoplasm,myeloid_neoplasm

SEQ ID NO: 478582 - DNA, 3 bp, Homo sapiens
  chr5:42993305-42993308
  hyper
  sarcoma vs. lymphoid_neoplasm
cgc

SEQ ID NO: 478583 - DNA, 2 bp, Homo sapiens
  chr5:43008736-43008738
  hyper
  sarcoma vs. colorectal,lymphoid_neoplasm
cg

SEQ ID NO: 478584 - DNA, 304 bp, Homo sapiens; identical to SEQ ID NO: 456026
  chr5:43019347-43019651
  hyper
  sarcoma vs. cervical,myeloid_neoplasm,lymphoid_neoplasm, colorectal,uterine,multiple_myeloma,prostate

SEQ ID NO: 478585 - DNA, 304 bp, Homo sapiens; identical to SEQ ID NO: 456026
  chr5:43019347-43019651
  hyper
  sarcoma vs. cervical,uterine,colorectal, lymphoid_neoplasm,myeloid_neoplasm,bladder_and_urothelial, thyroid,multiple_myeloma,non_cancer,prostate,upper_gi, head_and_neck

SEQ ID NO: 478586 - DNA, 260 bp, Homo sapiens; identical to SEQ ID NO: 456028
  chr5:43019887-43020147
  hyper
  sarcoma vs. cervical,uterine,colorectal, lymphoid_neoplasm,myeloid_neoplasm,bladder_and_urothelial, thyroid,multiple_myeloma,non_cancer,prostate,upper_gi, head_and_neck

SEQ ID NO: 478587 - DNA, 9 bp, Homo sapiens
  chr5:43020294-43020303
  hyper
  sarcoma vs. cervical,uterine,colorectal, lymphoid_neoplasm,myeloid_neoplasm,bladder_and_urothelial, thyroid,multiple_myeloma,non_cancer,prostate,upper_gi, head_and_neck
agccctagc

SEQ ID NO: 478588 - DNA, 260 bp, Homo sapiens; identical to SEQ ID NO: 456028
  chr5:43019887-43020147
  hyper
  sarcoma vs. cervical

SEQ ID NO: 478589 - DNA, 349 bp, Homo sapiens; identical to SEQ ID NO: 370713
  chr5:43020294-43020643
  hyper
  sarcoma vs. cervical

SEQ ID NO: 478590 - DNA, 328 bp, Homo sapiens; identical to SEQ ID NO: 332354
  chr5:43557434-43557762
  hyper
  sarcoma vs. head_and_neck,bladder_and_urothelial, anorectal,breast,lung,ovary,lymphoid_neoplasm,renal,uterine, colorectal,prostate,pancreas_gallbladder,multiple_myeloma, upper_gi,non_cancer,thyroid,liver_bileduct,cervical,melanoma

SEQ ID NO: 478591 - DNA, 76 bp, Homo sapiens; identical to SEQ ID NO: 454408
  chr5:54518558-54518634
  hyper
  sarcoma vs. myeloid_neoplasm,non_cancer

SEQ ID NO: 478592 - DNA, 210 bp, Homo sapiens; identical to SEQ ID NO: 461096
  chr5:54526958-54527168
  hyper
  sarcoma vs. cervical,myeloid_neoplasm

SEQ ID NO: 478593 - DNA, 1 bp, Homo sapiens
  chr5:54527844-54527845
  hyper
  sarcoma vs. cervical,myeloid_neoplasm
c

SEQ ID NO: 478594 - DNA, 308 bp, Homo sapiens; identical to SEQ ID NO: 332365
  chr5:56110226-56110534
  hyper
  sarcoma vs. liver_bileduct,lung,upper_gi,breast

SEQ ID NO: 478595 - DNA, 552 bp, Homo sapiens; identical to SEQ ID NO: 358113
  chr5:56112644-56113196
  hyper
  sarcoma vs. ovary,anorectal,uterine,head_and_neck, pancreas_gallbladder,breast,upper_gi,colorectal, multiple_myeloma

SEQ ID NO: 478596 - DNA, 98 bp, Homo sapiens; identical to SEQ ID NO: 472576
  chr5:66511687-66511785
  hyper
  sarcoma vs. myeloid_neoplasm,prostate,breast,melanoma, lymphoid_neoplasm

SEQ ID NO: 478597 - DNA, 115 bp, Homo sapiens; identical to SEQ ID NO: 464588
  chr5:72497779-72497894
  hyper
  sarcoma vs. pancreas_gallbladder,lymphoid_neoplasm, head_and_neck

SEQ ID NO: 478598 - DNA, 26 bp, Homo sapiens
  chr5:72598958-72598984
  hyper
  sarcoma vs. multiple_myeloma,anorectal
cgccgccggtactcaaggagccaccc

SEQ ID NO: 478599 - DNA, 4 bp, Homo sapiens
  chr5:72746989-72746993
  hyper
  sarcoma vs. breast,uterine,prostate
cgca

SEQ ID NO: 478600 - DNA, 301 bp, Homo sapiens
  chr5:72747520-72747821
  hyper
  sarcoma vs. breast,uterine,prostate
aggagcccctgcgcgggggtcacgtggattacgctaggtgagagccggagaggctgcgccaccgtcgggaggctccctgcctccgccctttgtcctttgcccctgaccatgagcgccccaagcccagggacctccttagggggatgaaggctggaagagacctgggggctcagacttacggggaaggaacctaggctattccttgtgcatcccaggattttacccatgaacgtgaacatgaacgtgttttcaaccccagcggttcccctggcgcctcgaccctcctttgaagagtcattct

SEQ ID NO: 478601 - DNA, 127 bp, Homo sapiens; identical to SEQ ID NO: 350091
  chr5:72747850-72747977
  hyper
  sarcoma vs. breast,uterine,prostate

SEQ ID NO: 478602 - DNA, 53 bp, Homo sapiens; identical to SEQ ID NO: 453291
  chr5:75698192-75698245
  hyper
  sarcoma vs. colorectal,pancreas_gallbladder,uterine, breast,cervical,prostate,upper_gi,non_cancer

SEQ ID NO: 478603 - DNA, 916 bp, Homo sapiens; identical to SEQ ID NO: 453292
  chr5:75698274-75699190
  hyper
  sarcoma vs. colorectal,pancreas_gallbladder,uterine, breast,cervical,prostate,upper_gi,non_cancer

SEQ ID NO: 478604 - DNA, 22 bp, Homo sapiens
  chr5:92906252-92906274
  hyper
  sarcoma vs. multiple_myeloma,anorectal,non_cancer, myeloid_neoplasm,thyroid
cgccaactgcccgcgcggaacc

SEQ ID NO: 478605 - DNA, 546 bp, Homo sapiens; identical to SEQ ID NO: 358188
  chr5:92943283-92943829
  hyper

SEQ ID NO: 478606 - DNA, 400 bp, Homo sapiens; identical to SEQ ID NO: 458140
  chr5:101631635-101632035
  hyper
  sarcoma vs. ovary,lung

SEQ ID NO: 478607 - DNA, 146 bp, Homo sapiens; identical to SEQ ID NO: 458141
  chr5:101632074-101632220
  hyper
  sarcoma vs. ovary,lung

SEQ ID NO: 478608 - DNA, 281 bp, Homo sapiens; identical to SEQ ID NO: 350137
  chr5:109024730-109025011
  hyper
  sarcoma vs. cervical,upper_gi,pancreas_gallbladder, breast,lymphoid_neoplasm,liver_bileduct

SEQ ID NO: 478609 - DNA, 113 bp, Homo sapiens
  chr5:122423762-122423875
  hyper
  sarcoma vs. melanoma
cggtatggccagaaccccggcgatgggaaagtacctcctgagtcggtcaatttcacacaccctgcctgtgccctctaccatctactaccgaaaatgccaggaagagctggggg

SEQ ID NO: 478610 - DNA, 332 bp, Homo sapiens
  chr5:122424105-122424437
  hyper
  sarcoma vs. melanoma
ttgtctccgggccccaagaaggagagggaaagagccctccagaagacaacccgagaaggggtcagcagagcgctgggtggagtgcagactccattgcagccgcctcccagccccacggccaagcttgagtccctccaggaccagctgctctcggtctcaggaccctcggtcctacgcctccctgcaccgacaagcctccctcctgggctgcagacagagggtttcactgcagcgcgcaacccgtcccgctccgcccccaacttttctccccggaggatttatgttagaggttgcgtggcgggcgagtggactctggcacccagaagcacttc

SEQ ID NO: 478611 - DNA, 3 bp, Homo sapiens
  chr5:122424688-122424691
  hyper
  sarcoma vs. melanoma
ggc

SEQ ID NO: 478612 - DNA, 288 bp, Homo sapiens
  chr5:122434876-122435164
  hyper
  sarcoma vs. anorectal
cgggctttttttcgcaatacaaggataaacacatcctgaaactccagatagaaacctcaggaatgggcgagagggtcagaaggaacgagagacagtagggaagagagagagagagacagagacagagggagagatgcagagagactgaaacgggaggaagaagcctggaactgtcggttccgtggagagcggacatgctatctgcgcccagatccgaaggctttttggggagcctagagtcctggcccggtaccaggcagatctgggtgcggcgaattccaagggagc

SEQ ID NO: 478613 - DNA, 103 bp, Homo sapiens
  chr5:122435201-122435304
  hyper
  sarcoma vs. anorectal
cggtgcccccaaggcatcaccttcctcgaaggtggcttacccaggcgggcggtgatgctgttgtctcgggagtttactcaaagatgggccgctcggggcggcc

SEQ ID NO: 478614 - DNA, 123 bp, Homo sapiens
  chr5:122435413-122435536
  hyper
  sarcoma vs. anorectal
cgccggcttgtgggcaccagcagcgctgcggccgccgcgcccccgccggagctgccggagtggctgcgggacctgcctcgcgaggtgtgcctctgcaccagtactgtgcccggcctggcctac

SEQ ID NO: 478615 - DNA, 12 bp, Homo sapiens
  chr5:122435628-122435640
  hyper
  sarcoma vs. anorectal
cgtgaggaacac

SEQ ID NO: 478616 - DNA, 186 bp, Homo sapiens; identical to SEQ ID NO: 462915
  chr5:134366533-134366719
  hyper
  sarcoma vs. head_and_neck,anorectal

SEQ ID NO: 478617 - DNA, 124 bp, Homo sapiens; identical to SEQ ID NO: 200036
  chr5:134367305-134367429
  hyper
  sarcoma vs. head_and_neck,anorectal

SEQ ID NO: 478618 - DNA, 173 bp, Homo sapiens; identical to SEQ ID NO: 477065
  chr5:134370281-134370454
  hyper
  sarcoma vs. cervical,lung,head_and_neck,breast

SEQ ID NO: 478619 - DNA, 38 bp, Homo sapiens; identical to SEQ ID NO: 358244
  chr5:134370508-134370546
  hyper
  sarcoma vs. cervical,lung,head_and_neck,breast

SEQ ID NO: 478620 - DNA, 84 bp, Homo sapiens; identical to SEQ ID NO: 350171
  chr5:134375851-134375935
  hyper
  sarcoma vs. melanoma,anorectal,head_and_neck

SEQ ID NO: 478621 - DNA, 46 bp, Homo sapiens; identical to SEQ ID NO: 461162
  chr5:134827217-134827263
  hyper
  sarcoma vs. colorectal,liver_bileduct,upper_gi

SEQ ID NO: 478622 - DNA, 73 bp, Homo sapiens; identical to SEQ ID NO: 345194
  chr5:134880614-134880687
  hyper
  sarcoma vs. thyroid,myeloid_neoplasm,non_cancer

SEQ ID NO: 478623 - DNA, 335 bp, Homo sapiens; identical to SEQ ID NO: 350178
  chr5:139135589-139135924
  hyper
  sarcoma vs. ovary,colorectal,prostate,upper_gi,cervical, pancreas_gallbladder,uterine

SEQ ID NO: 478624 - DNA, 307 bp, Homo sapiens; identical to SEQ ID NO: 332512
  chr5:139175997-139176304
  hyper
  sarcoma vs. ovary

SEQ ID NO: 478625 - DNA, 601 bp, Homo sapiens; identical to SEQ ID NO: 332514
  chr5:139487921-139488522
  hyper
  sarcoma vs. upper_gi,bladder_and_urothelial,colorectal, breast,renal,cervical,prostate,melanoma,ovary,anorectal, pancreas_gallbladder,lung,liver_bileduct,head_and_neck, lymphoid_neoplasm,uterine,non_cancer,multiple_myeloma,thyroid,
  CONT. FROM ABOVE: myeloid_neoplasm

SEQ ID NO: 478626 - DNA, 276 bp, Homo sapiens; identical to SEQ ID NO: 332516
  chr5:139554306-139554582
  hyper
  sarcoma vs. ovary,lung,upper_gi,pancreas_gallbladder, colorectal

SEQ ID NO: 478627 - DNA, 625 bp, Homo sapiens; identical to SEQ ID NO: 456042
  chr5:142781875-142782500
  hyper
  sarcoma vs. anorectal,multiple_myeloma,myeloid_neoplasm, non_cancer,renal,lymphoid_neoplasm

SEQ ID NO: 478628 - DNA, 78 bp, Homo sapiens; identical to SEQ ID NO: 456043
  chr5:142782625-142782703
  hyper
  sarcoma vs. anorectal,multiple_myeloma,myeloid_neoplasm, non_cancer,renal,lymphoid_neoplasm

SEQ ID NO: 478629 - DNA, 299 bp, Homo sapiens; identical to SEQ ID NO: 332541
  chr5:149381214-149381513
  hyper
  sarcoma vs. melanoma

SEQ ID NO: 478630 - DNA, 227 bp, Homo sapiens
  chr5:153854949-153855176
  hyper
  sarcoma vs. myeloid_neoplasm
cggcgtcggggcggatcatatggagggacaagagagaaagagccagatagggaaatggagatagggctgaggttctaaattcgctccaaaagggtggaagagtgcgtctttgagcccttgggttcgacagtccctccttcttgcatgttgccgccaagggccgccctcggttgggctgggggtggatatatatatatttctctttctcttaatgtattaaaaaaaat

SEQ ID NO: 478631 - DNA, 160 bp, Homo sapiens
  chr5:153900641-153900801
  hyper
  sarcoma vs. head_and_neck,liver_bileduct,renal,lung, upper_gi,colorectal,multiple_myeloma,prostate, pancreas_gallbladder,breast,anorectal,uterine,melanoma
cgagggcgctgagctcccggtatcctctaggtggcgcacaattctctggggaaaaggagaattccaggtgaactaattccacgggaagaagggttggtttgggaggggctaagccctgcctacgggctcctgtaggggaatcagctccccatccccctgc

SEQ ID NO: 478632 - DNA, 9 bp, Homo sapiens
  chr5:153900830-153900839
  hyper
  sarcoma vs. head_and_neck,liver_bileduct,renal,lung, upper_gi,colorectal,multiple_myeloma,prostate, pancreas_gallbladder,breast,anorectal,uterine,melanoma
cattcgctc

SEQ ID NO: 478633 - DNA, 772 bp, Homo sapiens; identical to SEQ ID NO: 332579
  chr5:172198713-172199485
  hyper
  sarcoma vs. lung

SEQ ID NO: 478634 - DNA, 251 bp, Homo sapiens; identical to SEQ ID NO: 332580
  chr5:172234246-172234497
  hyper
  sarcoma vs. lymphoid_neoplasm

SEQ ID NO: 478635 - DNA, 152 bp, Homo sapiens; identical to SEQ ID NO: 358311
  chr5:172656561-172656713
  hyper
  sarcoma vs. thyroid,myeloid_neoplasm

SEQ ID NO: 478636 - DNA, 181 bp, Homo sapiens; identical to SEQ ID NO: 350215
  chr5:172660254-172660435
  hyper
  sarcoma vs. cervical,anorectal,prostate,renal

SEQ ID NO: 478637 - DNA, 343 bp, Homo sapiens
  chr5:172663868-172664211
  hyper
  sarcoma vs. multiple_myeloma,myeloid_neoplasm,thyroid, liver_bileduct,non_cancer
tgagacgccgacgcaagtgaagtcaagcattggcctgatgttgggacttttcctgtccctcatcaaagccacactcccaggacctggggcctccatgctggggagagaggtgagccccgcagggcagcccaggaggcgcgcaacgccctgaccccggcttctaggcgccagccgtcagtaacaggcctgggctgccacgccgaaatcacgcctcgagtttctgagccagggactactgggggtctggaattgttagtctagtctgtggaggatgccttttcttaaatgtggggcgttcaaggcccaggaaacctcgtccccccacctcttcacctcccaaccc

SEQ ID NO: 478638 - DNA, 143 bp, Homo sapiens; identical to SEQ ID NO: 464637
  chr5:172665306-172665449
  hyper
  sarcoma vs. ovary

SEQ ID NO: 478639 - DNA, 297 bp, Homo sapiens; identical to SEQ ID NO: 358315
  chr5:172665949-172666246
  hyper
  sarcoma vs. ovary

SEQ ID NO: 478640 - DNA, 163 bp, Homo sapiens
  chr5:172756215-172756378
  hyper
  sarcoma vs. renal,cervical,uterine,ovary,lung,prostate, breast
cgccgcggagcatcgcgtgcccggaggccagagcttgaaaggcaactttacgcgtctccaaacacactcctgcattttctcaaagcgctgctcgccaccccgctccgggttcccttttactctccagtcatccgatggaagtggtgagaacaaaaacaaagac

SEQ ID NO: 478641 - DNA, 159 bp, Homo sapiens; identical to SEQ ID NO: 332604
  chr5:176239899-176240058
  hyper
  sarcoma vs. colorectal,bladder_and_urothelial,uterine, anorectal,breast

SEQ ID NO: 478642 - DNA, 64 bp, Homo sapiens; identical to SEQ ID NO: 456056
  chr5:180632796-180632860
  hyper

SEQ ID NO: 478643 - DNA, 244 bp, Homo sapiens; identical to SEQ ID NO: 358355
  chr5:180633225-180633469
  hyper

SEQ ID NO: 478644 - DNA, 66 bp, Homo sapiens
  chr6:3228121-3228187
  hyper
  sarcoma vs. anorectal,cervical
cgtgcgcattgtctggggctgtggtgggggtctgggtatggggatatgggggaacagtgaagaaaa

SEQ ID NO: 478645 - DNA, 239 bp, Homo sapiens
  chr6:3228680-3228919
  hyper
  sarcoma vs. anorectal,cervical
ctgcccgaccctctccgggagtgcataacgcccctgctggtacccaggagccctctgccccgggggttgacttttgttgctcgctagtgatggagtgggagtggccggtggcgctgcactgaccgtccggagggcagaaagagggtggggtcccgggggcggggctgtcggcggaacaaagggctctcagaaacgtgggatacgctgtgtaacccagtatttaaaaccacacgacaggc

SEQ ID NO: 478646 - DNA, 242 bp, Homo sapiens
  chr6:3228680-3228922
  hyper
  sarcoma vs. anorectal,cervical
ctgcccgaccctctccgggagtgcataacgcccctgctggtacccaggagccctctgccccgggggttgacttttgttgctcgctagtgatggagtgggagtggccggtggcgctgcactgaccgtccggagggcagaaagagggtggggtcccgggggcggggctgtcggcggaacaaagggctctcagaaacgtgggatacgctgtgtaacccagtatttaaaaccacacgacaggcgcc

SEQ ID NO: 478647 - DNA, 12 bp, Homo sapiens
  chr6:3229296-3229308
  hyper
  sarcoma vs. ovary
cgtgcgtttgag

SEQ ID NO: 478648 - DNA, 559 bp, Homo sapiens; identical to SEQ ID NO: 358374
  chr6:3229632-3230191
  hyper
  sarcoma vs. ovary

SEQ ID NO: 478649 - DNA, 684 bp, Homo sapiens; identical to SEQ ID NO: 332639
  chr6:3457545-3458229
  hyper
  sarcoma vs. ovary,colorectal,breast,lung, pancreas_gallbladder,cervical,head_and_neck,uterine

SEQ ID NO: 478650 - DNA, 95 bp, Homo sapiens; identical to SEQ ID NO: 200248
  chr6:4775543-4775638
  hyper
  sarcoma vs. ovary

SEQ ID NO: 478651 - DNA, 305 bp, Homo sapiens; identical to SEQ ID NO: 458177
  chr6:4775640-4775945
  hyper
  sarcoma vs. ovary

SEQ ID NO: 478652 - DNA, 82 bp, Homo sapiens
  chr6:5997308-5997390
  hyper
  sarcoma vs. anorectal,ovary
cgactcactgggtttgatttatgaactgttacactagcaattgtttacacattgcatttcagagcccgggcccaccctcccc

SEQ ID NO: 478653 - DNA, 113 bp, Homo sapiens; identical to SEQ ID NO: 453352
  chr6:5997401-5997514
  hyper
  sarcoma vs. anorectal,ovary

SEQ ID NO: 478654 - DNA, 162 bp, Homo sapiens; identical to SEQ ID NO: 358388
  chr6:5997899-5998061
  hyper
  sarcoma vs. anorectal,ovary

SEQ ID NO: 478655 - DNA, 447 bp, Homo sapiens; identical to SEQ ID NO: 467550
  chr6:17101827-17102274
  hyper
  sarcoma vs. ovary,breast

SEQ ID NO: 478656 - DNA, 192 bp, Homo sapiens; identical to SEQ ID NO: 358412
  chr6:17102346-17102538
  hyper
  sarcoma vs. ovary,breast

SEQ ID NO: 478657 - DNA, 2 bp, Homo sapiens
  chr6:26198838-26198840
  hyper
  sarcoma vs. melanoma,cervical,uterine,anorectal, bladder_and_urothelial,head_and_neck
cg

SEQ ID NO: 478658 - DNA, 214 bp, Homo sapiens; identical to SEQ ID NO: 464663
  chr6:26198924-26199138
  hyper
  sarcoma vs. melanoma,cervical,uterine,anorectal, bladder_and_urothelial,head_and_neck

SEQ ID NO: 478659 - DNA, 16 bp, Homo sapiens
  chr6:26199167-26199183
  hyper
  sarcoma vs. melanoma,cervical,uterine,anorectal, bladder_and_urothelial,head_and_neck
tgactttacccagcaa

SEQ ID NO: 478660 - DNA, 16 bp, Homo sapiens
  chr6:26199167-26199183
  hyper
  sarcoma vs. melanoma,cervical,anorectal, bladder_and_urothelial,head_and_neck,uterine
tgactttacccagcaa

SEQ ID NO: 478661 - DNA, 2 bp, Homo sapiens
  chr6:26199878-26199880
  hyper
  sarcoma vs. melanoma,cervical,anorectal, bladder_and_urothelial,head_and_neck,uterine
gc

SEQ ID NO: 478662 - DNA, 124 bp, Homo sapiens; identical to SEQ ID NO: 332704
  chr6:26330521-26330645
  hyper
  sarcoma vs. lymphoid_neoplasm,bladder_and_urothelial, uterine

SEQ ID NO: 478663 - DNA, 71 bp, Homo sapiens; identical to SEQ ID NO: 453362
  chr6:26331633-26331704
  hyper
  sarcoma vs. uterine,non_cancer,myeloid_neoplasm,thyroid, colorectal,lymphoid_neoplasm,upper_gi,multiple_myeloma,breast

SEQ ID NO: 478664 - DNA, 324 bp, Homo sapiens; identical to SEQ ID NO: 453363
  chr6:26331811-26332135
  hyper
  sarcoma vs. uterine,non_cancer,myeloid_neoplasm,thyroid, colorectal,lymphoid_neoplasm,upper_gi,multiple_myeloma,breast

SEQ ID NO: 478665 - DNA, 243 bp, Homo sapiens; identical to SEQ ID NO: 345222
  chr6:26332283-26332526
  hyper
  sarcoma vs. uterine,non_cancer,myeloid_neoplasm,thyroid, colorectal,lymphoid_neoplasm,upper_gi,multiple_myeloma,breast

SEQ ID NO: 478666 - DNA, 361 bp, Homo sapiens; identical to SEQ ID NO: 469320
  chr6:27218591-27218952
  hyper
  sarcoma vs. lung,ovary,pancreas_gallbladder

SEQ ID NO: 478667 - DNA, 447 bp, Homo sapiens; identical to SEQ ID NO: 358461
  chr6:27218980-27219427
  hyper
  sarcoma vs. lung,ovary,pancreas_gallbladder

SEQ ID NO: 478668 - DNA, 578 bp, Homo sapiens; identical to SEQ ID NO: 469328
  chr6:36354750-36355328
  hyper
  sarcoma vs. liver_bileduct,colorectal,cervical,anorectal, pancreas_gallbladder,multiple_myeloma,prostate,head_and_neck, myeloid_neoplasm

SEQ ID NO: 478669 - DNA, 150 bp, Homo sapiens; identical to SEQ ID NO: 469329
  chr6:36355357-36355507
  hyper
  sarcoma vs. liver_bileduct,colorectal,cervical,anorectal, pancreas_gallbladder,multiple_myeloma,prostate,head_and_neck, myeloid_neoplasm

SEQ ID NO: 478670 - DNA, 299 bp, Homo sapiens; identical to SEQ ID NO: 469330
  chr6:36355029-36355328
  hyper
  sarcoma vs. colorectal,liver_bileduct,anorectal,cervical, pancreas_gallbladder,multiple_myeloma,head_and_neck,prostate, uterine,myeloid_neoplasm,non_cancer,thyroid,upper_gi,breast, renal

SEQ ID NO: 478671 - DNA, 407 bp, Homo sapiens; identical to SEQ ID NO: 350350
  chr6:36355357-36355764
  hyper
  sarcoma vs. colorectal,liver_bileduct,anorectal,cervical, pancreas_gallbladder,multiple_myeloma,head_and_neck,prostate, uterine,myeloid_neoplasm,non_cancer,thyroid,upper_gi,breast, renal

SEQ ID NO: 478672 - DNA, 370 bp, Homo sapiens; identical to SEQ ID NO: 469334
  chr6:37666475-37666845
  hyper
  sarcoma vs. ovary,bladder_and_urothelial,lung,cervical, breast,prostate,head_and_neck,anorectal,upper_gi, pancreas_gallbladder,uterine,non_cancer,thyroid, multiple_myeloma

SEQ ID NO: 478673 - DNA, 218 bp, Homo sapiens; identical to SEQ ID NO: 345233
  chr6:37666866-37667084
  hyper
  sarcoma vs. ovary,bladder_and_urothelial,lung,cervical, breast,prostate,head_and_neck,anorectal,upper_gi, pancreas_gallbladder,uterine,non_cancer,thyroid, multiple_myeloma

SEQ ID NO: 478674 - DNA, 180 bp, Homo sapiens; identical to SEQ ID NO: 464703
  chr6:43243254-43243434
  hyper
  sarcoma vs. pancreas_gallbladder,bladder_and_urothelial, multiple_myeloma,colorectal

SEQ ID NO: 478675 - DNA, 534 bp, Homo sapiens; identical to SEQ ID NO: 464704
  chr6:43243475-43244009
  hyper
  sarcoma vs. pancreas_gallbladder,bladder_and_urothelial, multiple_myeloma,colorectal

SEQ ID NO: 478676 - DNA, 487 bp, Homo sapiens
  chr6:43243546-43244033
  hyper
  sarcoma vs. pancreas_gallbladder,bladder_and_urothelial, multiple_myeloma,anorectal,colorectal
cgaaaataaaactcagggaccaacatctgcttcctttgcacttgctccgtcgaccccgctccccgctcggaggggcttccgtgggggagggggcggggctccgggccctcagagttctcagtgtcgagcgaggagaggggctggcccctgcccccggagaagcgggactggtaggagagagaaactcagcaccggggcccagctgagccccttcctgcgtaaggagacgccttctaattgcggggtgggggcggagtaggggagggataggaaggggattagcgagaggaccctcgcggaggtcctgagtcccagtcggtttattcctgagccttcccctcccatcgtaagtccttccctcgaccccccattttgtactgcaataatactgtattatacgcttgcactatttcccgaccctggccagcggaagcatgcacgaaaaactcaaaaccacacacacgctcacacgcacacacacgcacac

SEQ ID NO: 478677 - DNA, 124 bp, Homo sapiens
  chr6:85478295-85478419
  hyper
  sarcoma vs. thyroid
cgtgaacatcagcctacgctgagtcaccaggcagcgccgcacaaatgggctagggcttcccctttccgcgattcctgtccctactctttcccactctctttcttctctttgcacatacttttct

SEQ ID NO: 478678 - DNA, 59 bp, Homo sapiens
  chr6:85478456-85478515
  hyper
  sarcoma vs. thyroid
tttatcttgtacaagtttataaagcctacggtagtaaattcaggcgtcccagggctcaa

SEQ ID NO: 478679 - DNA, 102 bp, Homo sapiens; identical to SEQ ID NO: 469351
  chr6:99276279-99276381
  hyper
  sarcoma vs. ovary,bladder_and_urothelial, multiple_myeloma

SEQ ID NO: 478680 - DNA, 275 bp, Homo sapiens; identical to SEQ ID NO: 469352
  chr6:99276430-99276705
  hyper
  sarcoma vs. ovary,bladder_and_urothelial, multiple_myeloma

SEQ ID NO: 478681 - DNA, 234 bp, Homo sapiens; identical to SEQ ID NO: 350433
  chr6:99276781-99277015
  hyper
  sarcoma vs. ovary,bladder_and_urothelial, multiple_myeloma

SEQ ID NO: 478682 - DNA, 95 bp, Homo sapiens
  chr6:99276610-99276705
  hyper
  sarcoma vs. ovary,uterine,bladder_and_urothelial
cgaaactctgagacctagcagaagattttggcccacagttattacgactgtggttaactgctctccagaaaagcatctctcccgcccgtgcacca

SEQ ID NO: 478683 - DNA, 400 bp, Homo sapiens
  chr6:99276781-99277181
  hyper
  sarcoma vs. ovary,uterine,bladder_and_urothelial
gtgcacttgtacacttcagaaggatttgcattcgtgctgtgtgcaggcagaataagagaactgaagtccaacttcaaccaaatacgcctgtttatcccagggctggagcaacagccctagcccttgaaaatggcttcagtgaaatagctgagtacaccctcctcccacttccccagtccgcctctgtgcgcaggtgtatgttagtgcactcgtccctagcttgccttcctcttcgaaaattgctccagaggatgagagaagccaggagctctagcaagagcttcatcccagtacatttccaaatgctttagagctaaggaggtttctgttgaaatcactttaatttatcaaagagttgtcatcccctactggtggccagccatccacctgctttaaggct

SEQ ID NO: 478684 - DNA, 61 bp, Homo sapiens; identical to SEQ ID NO: 464726
  chr6:99292143-99292204
  hyper
  sarcoma vs. ovary,prostate,uterine,multiple_myeloma, myeloid_neoplasm

SEQ ID NO: 478685 - DNA, 109 bp, Homo sapiens; identical to SEQ ID NO: 350435
  chr6:99292521-99292630
  hyper
  sarcoma vs. ovary,prostate,uterine,multiple_myeloma, myeloid_neoplasm

SEQ ID NO: 478686 - DNA, 249 bp, Homo sapiens
  chr6:106808607-106808856
  hyper
  sarcoma vs. lung
cgctgggtgctggttctgcaacccgcggccgtccccccgcatccgcgacgagggggcggggtcccacggcgcgctgagaaaggcgggcgagctggcgctcaggtgtgttcttccatagggcccgggcggcagagaggaccgcgtcccggcagtcggagcgggaggaggacaagacgatgccgctgtccccgccagcccagggcgaccccggggagcccagcccgtgcaggccccctaagaagcacacca

SEQ ID NO: 478687 - DNA, 113 bp, Homo sapiens; identical to SEQ ID NO: 358622
  chr6:106809184-106809297
  hyper
  sarcoma vs. lung

SEQ ID NO: 478688 - DNA, 105 bp, Homo sapiens; identical to SEQ ID NO: 454463
  chr6:106958136-106958241
  hyper
  sarcoma vs. breast,cervical,prostate

SEQ ID NO: 478689 - DNA, 404 bp, Homo sapiens; identical to SEQ ID NO: 345246
  chr6:106958337-106958741
  hyper
  sarcoma vs. breast,cervical,prostate

SEQ ID NO: 478690 - DNA, 45 bp, Homo sapiens; identical to SEQ ID NO: 464733
  chr6:108484828-108484873
  hyper
  sarcoma vs. thyroid,non_cancer

SEQ ID NO: 478691 - DNA, 168 bp, Homo sapiens
  chr6:109330991-109331159
  hyper
  sarcoma vs. melanoma
cgcgaggtgagcgtgcactgtcaggaaggtgcagcacgagtcttcgggcttcagggacaggggaatctgccccctacacccctgctcggccatttacctagaaccaaacagcagccaacctcgagactgattctgacagcaccaggagtaatgaagttctctaaattc

SEQ ID NO: 478692 - DNA, 226 bp, Homo sapiens; identical to SEQ ID NO: 371302
  chr6:109331216-109331442
  hyper
  sarcoma vs. melanoma

SEQ ID NO: 478693 - DNA, 265 bp, Homo sapiens; identical to SEQ ID NO: 456094
  chr6:111409052-111409317
  hyper

SEQ ID NO: 478694 - DNA, 274 bp, Homo sapiens; identical to SEQ ID NO: 456095
  chr6:111409368-111409642
  hyper

SEQ ID NO: 478695 - DNA, 132 bp, Homo sapiens
  chr6:142622583-142622715
  hyper
  sarcoma vs. melanoma,lung,upper_gi
cgggagcgtggcggggggacccgcgcggggactcgggtaggctgcaaacgctggggagatgccacaggagcgcctgccttcccagcttctcctttctctcgccgagggtctctggggttcagcgctcccggc

SEQ ID NO: 478696 - DNA, 486 bp, Homo sapiens; identical to SEQ ID NO: 358663
  chr6:142622963-142623449
  hyper
  sarcoma vs. melanoma,lung,upper_gi

SEQ ID NO: 478697 - DNA, 369 bp, Homo sapiens; identical to SEQ ID NO: 453400
  chr6:143247975-143248344
  hyper
  sarcoma vs. liver_bileduct,pancreas_gallbladder, non_cancer,colorectal,uterine,renal,upper_gi,thyroid,cervical

SEQ ID NO: 478698 - DNA, 370 bp, Homo sapiens; identical to SEQ ID NO: 332946
  chr6:143268770-143269140
  hyper
  sarcoma vs. uterine,renal,upper_gi,liver_bileduct, cervical,lymphoid_neoplasm

SEQ ID NO: 478699 - DNA, 87 bp, Homo sapiens; identical to SEQ ID NO: 469383
  chr6:150284581-150284668
  hyper
  sarcoma vs. colorectal

SEQ ID NO: 478700 - DNA, 520 bp, Homo sapiens; identical to SEQ ID NO: 346865
  chr6:158402113-158402633
  hyper
  sarcoma vs. pancreas_gallbladder,cervical, bladder_and_urothelial,renal,prostate,upper_gi,thyroid, liver_bileduct,non_cancer,multiple_myeloma,head_and_neck, colorectal,lung

SEQ ID NO: 478701 - DNA, 241 bp, Homo sapiens
  chr6:159654657-159654898
  hyper
  sarcoma vs. prostate,renal,myeloid_neoplasm,non_cancer, ovary
cgggcggccccgccccacgtcgcagggccgctcccactcctcctcggacccttacacggcgagctccagagggatgctccccacggccctccagaaccaggacgaggatgcccagggcagctacgacgacgacagcacagaagtcgaggcccaggatgtgcgggcccccgcgcacgccgcgcgcgccaaggaggcagctgcgtcccttcccaagcaccagcaggtggagtctcccacaggc

SEQ ID NO: 478702 - DNA, 63 bp, Homo sapiens
  chr6:159655003-159655066
  hyper
  sarcoma vs. prostate,renal,myeloid_neoplasm,non_cancer, ovary
gcagcgccggggaagtcggagcctccttccaagcggcccctgtcctccaagtcccagcagtcg

SEQ ID NO: 478703 - DNA, 257 bp, Homo sapiens; identical to SEQ ID NO: 350486
  chr6:159655082-159655339
  hyper
  sarcoma vs. prostate,renal,myeloid_neoplasm,non_cancer, ovary

SEQ ID NO: 478704 - DNA, 55 bp, Homo sapiens; identical to SEQ ID NO: 350493
  chr6:166268182-166268237
  hyper
  sarcoma vs. multiple_myeloma,anorectal, bladder_and_urothelial,non_cancer

SEQ ID NO: 478705 - DNA, 335 bp, Homo sapiens
  chr6:167039793-167040128
  hyper
  sarcoma vs. lung
cgaatctgtatcagcctcggcgctgcgaggatattgcatcaggctctttactcctgaacgccgttttagacgcctaagcagattgtgctgctgcctgttcttccccgttctgtgaattctacactgacttcaagtgcacgaatgagctacaagataaggtggaacctgccggccgggcacggcagacagcacctgatcagcgcctcggagggcggagctggggggcttctccactcgggactttgagggacccccgcggagcgctccgcgccactcggcggtctagctgcagagaaagcccctcctcacccggggctccctgtggcccacagggg

SEQ ID NO: 478706 - DNA, 423 bp, Homo sapiens; identical to SEQ ID NO: 358703
  chr6:167040325-167040748
  hyper
  sarcoma vs. lung

SEQ ID NO: 478707 - DNA, 506 bp, Homo sapiens; identical to SEQ ID NO: 345259
  chr6:170124879-170125385
  hyper
  sarcoma vs. ovary,pancreas_gallbladder,uterine, multiple_myeloma,lung,cervical,colorectal,breast,anorectal, prostate,non_cancer,head_and_neck,bladder_and_urothelial, thyroid,myeloid_neoplasm,upper_gi,renal,lymphoid_neoplasm

SEQ ID NO: 478708 - DNA, 26 bp, Homo sapiens
  chr6:170598179-170598205
  hyper
  sarcoma vs. uterine
cgagggcccttgtcatttttcttggg

SEQ ID NO: 478709 - DNA, 264 bp, Homo sapiens; identical to SEQ ID NO: 371387
  chr6:170598840-170599104
  hyper
  sarcoma vs. uterine

SEQ ID NO: 478710 - DNA, 173 bp, Homo sapiens; identical to SEQ ID NO: 371399
  chr7:561245-561418
  hyper
  sarcoma vs. myeloid_neoplasm

SEQ ID NO: 478711 - DNA, 148 bp, Homo sapiens
  chr7:1708913-1709061
  hyper
  sarcoma vs. bladder_and_urothelial,breast,cervical, anorectal
cggcgagcggagagcgtgccgggggtactgaggccgggaaccagaggcgggcgggggacaggaagcggggagggggcgccggcggggacgcgcgggctgcgcggggactggagagggtccccaggcgccggccgttctgcgaacgcgg

SEQ ID NO: 478712 - DNA, 290 bp, Homo sapiens; identical to SEQ ID NO: 333006
  chr7:2517249-2517539
  hyper
  sarcoma vs. renal,uterine,pancreas_gallbladder, liver_bileduct,prostate,colorectal,lymphoid_neoplasm,non_cancer, myeloid_neoplasm,thyroid

SEQ ID NO: 478713 - DNA, 272 bp, Homo sapiens
  chr7:16793071-16793343
  hyper
  sarcoma vs. head_and_neck,upper_gi,lung,breast
cgtcatctgccagggccaagaatccagaggtgctgtcatatttctccttgccagcgtggatctcctccgagccccgccctccctcctcacctgctcctggggaaactacaccaaggccgccgctctggcctggggctccctcccacacggccttggccctctccccctcgccccgggaccgctccgcccctcccggatcccggtcggcggagcgcatttatttgcatatttctacctttgttccctgccagcggccaatcagcgcgcggggc

SEQ ID NO: 478714 - DNA, 182 bp, Homo sapiens; identical to SEQ ID NO: 114656
  chr7:16793380-16793562
  hyper
  sarcoma vs. head_and_neck,upper_gi,lung,breast

SEQ ID NO: 478715 - DNA, 216 bp, Homo sapiens; identical to SEQ ID NO: 475832
  chr7:17339346-17339562
  hyper
  sarcoma vs. liver_bileduct,upper_gi,lymphoid_neoplasm, anorectal,colorectal,bladder_and_urothelial

SEQ ID NO: 478716 - DNA, 260 bp, Homo sapiens; identical to SEQ ID NO: 350518
  chr7:17339591-17339851
  hyper
  sarcoma vs. liver_bileduct,upper_gi,lymphoid_neoplasm, anorectal,colorectal,bladder_and_urothelial

SEQ ID NO: 478717 - DNA, 128 bp, Homo sapiens
  chr7:19183520-19183648
  hyper
  sarcoma vs. thyroid,multiple_myeloma,non_cancer, myeloid_neoplasm
cggtggctggtggcgaagctgcagggcgcccaaggccccctgcggcccaggagtgacccgagtgcactcgccccttactctggcctggggcctgaagaaggcactggaacacggaagctgatgctgca

SEQ ID NO: 478718 - DNA, 313 bp, Homo sapiens
  chr7:19183746-19184059
  hyper
  sarcoma vs. thyroid,multiple_myeloma,non_cancer, myeloid_neoplasm
aggtggcgaaggggagggagaaaggaagagagagggcttgcgcgcgggagagaggaagggacgggagggagagggaatggaagacaggaagggtgtcccttctcagaggtcgcactttgtcagcagttcctctcgactgctctgccttccatttttcctttcctcagttcctggacaagcctcggaggaccaggcagaaccctctggctagcagaaaagctcgcacccccgcacccttgcggcgtctgcttcagaccctccacgcaggcgcccgctggagcgcctgctggggatggcgtaccaccgacccttc

SEQ ID NO: 478719 - DNA, 276 bp, Homo sapiens; identical to SEQ ID NO: 333045
  chr7:20369119-20369395
  hyper
  sarcoma vs. lung,liver_bileduct,head_and_neck,ovary

SEQ ID NO: 478720 - DNA, 255 bp, Homo sapiens; identical to SEQ ID NO: 333054
  chr7:21293835-21294090
  hyper
  sarcoma vs. pancreas_gallbladder,ovary

SEQ ID NO: 478721 - DNA, 523 bp, Homo sapiens; identical to SEQ ID NO: 456115
  chr7:23507580-23508103
  hyper
  sarcoma vs. lymphoid_neoplasm,cervical,thyroid, multiple_myeloma,uterine,myeloid_neoplasm,non_cancer

SEQ ID NO: 478722 - DNA, 122 bp, Homo sapiens; identical to SEQ ID NO: 454478
  chr7:23507981-23508103
  hyper
  sarcoma vs. lymphoid_neoplasm

SEQ ID NO: 478723 - DNA, 28 bp, Homo sapiens
  chr7:25891919-25891947
  hyper
  sarcoma vs. myeloid_neoplasm,thyroid
cgttacagggtgggactgggtggagcag

SEQ ID NO: 478724 - DNA, 189 bp, Homo sapiens; identical to SEQ ID NO: 461248
  chr7:25892243-25892432
  hyper
  sarcoma vs. myeloid_neoplasm,thyroid

SEQ ID NO: 478725 - DNA, 6 bp, Homo sapiens
  chr7:25892608-25892614
  hyper
  sarcoma vs. myeloid_neoplasm,thyroid
gggatc

SEQ ID NO: 478726 - DNA, 338 bp, Homo sapiens; identical to SEQ ID NO: 333071
  chr7:25894678-25895016
  hyper
  sarcoma vs. colorectal

SEQ ID NO: 478727 - DNA, 225 bp, Homo sapiens; identical to SEQ ID NO: 456125
  chr7:26192423-26192648
  hyper
  sarcoma vs. upper_gi,colorectal,anorectal, multiple_myeloma,lymphoid_neoplasm

SEQ ID NO: 478728 - DNA, 20 bp, Homo sapiens
  chr7:26192666-26192686
  hyper
  sarcoma vs. upper_gi,colorectal,anorectal, multiple_myeloma,lymphoid_neoplasm
cgctggcggatgtgcgagcg

SEQ ID NO: 478729 - DNA, 112 bp, Homo sapiens; identical to SEQ ID NO: 456127
  chr7:26192748-26192860
  hyper
  sarcoma vs. upper_gi,colorectal,anorectal, multiple_myeloma,lymphoid_neoplasm

SEQ ID NO: 478730 - DNA, 91 bp, Homo sapiens; identical to SEQ ID NO: 456128
  chr7:27135176-27135267
  hyper
  sarcoma vs. bladder_and_urothelial,lymphoid_neoplasm

SEQ ID NO: 478731 - DNA, 63 bp, Homo sapiens; identical to SEQ ID NO: 464772
  chr7:42267546-42267609
  hyper
  sarcoma vs. thyroid

SEQ ID NO: 478732 - DNA, 139 bp, Homo sapiens; identical to SEQ ID NO: 350569
  chr7:42267822-42267961
  hyper
  sarcoma vs. thyroid

SEQ ID NO: 478733 - DNA, 52 bp, Homo sapiens; identical to SEQ ID NO: 453417
  chr7:42927739-42927791
  hyper
  sarcoma vs. renal,ovary,colorectal,pancreas_gallbladder, uterine,prostate,non_cancer,myeloid_neoplasm, bladder_and_urothelial

SEQ ID NO: 478734 - DNA, 412 bp, Homo sapiens; identical to SEQ ID NO: 346903
  chr7:42928175-42928587
  hyper
  sarcoma vs. renal,ovary,colorectal,pancreas_gallbladder, uterine,prostate,non_cancer,myeloid_neoplasm, bladder_and_urothelial

SEQ ID NO: 478735 - DNA, 219 bp, Homo sapiens; identical to SEQ ID NO: 371555
  chr7:47621704-47621923
  hyper
  sarcoma vs. liver_bileduct

SEQ ID NO: 478736 - DNA, 107 bp, Homo sapiens; identical to SEQ ID NO: 467674
  chr7:87936014-87936121
  hyper
  sarcoma vs. myeloid_neoplasm,uterine, bladder_and_urothelial,prostate,colorectal

SEQ ID NO: 478737 - DNA, 19 bp, Homo sapiens
  chr7:87936206-87936225
  hyper
  sarcoma vs. myeloid_neoplasm,uterine, bladder_and_urothelial,prostate,colorectal
gctgtggcttgtggctctc

SEQ ID NO: 478738 - DNA, 187 bp, Homo sapiens; identical to SEQ ID NO: 467676
  chr7:87936227-87936414
  hyper
  sarcoma vs. myeloid_neoplasm,uterine, bladder_and_urothelial,prostate,colorectal

SEQ ID NO: 478739 - DNA, 156 bp, Homo sapiens
  chr7:96632634-96632790
  hyper
  sarcoma vs. renal
cgatttgtaaacgtgtagatcgtgttactggttcgcgtgttaaagtgcacctcttgttaaaaggtggggaacagggcacgccacttaaaaatgaattcagagttactgaaccggctccccagactcaagaacttaagcgcaacgggctgggaaaag

SEQ ID NO: 478740 - DNA, 177 bp, Homo sapiens; identical to SEQ ID NO: 371621
  chr7:96632819-96632996
  hyper
  sarcoma vs. renal

SEQ ID NO: 478741 - DNA, 235 bp, Homo sapiens; identical to SEQ ID NO: 358902
  chr7:98030416-98030651
  hyper
  sarcoma vs. liver_bileduct

SEQ ID NO: 478742 - DNA, 154 bp, Homo sapiens; identical to SEQ ID NO: 333194
  chr7:99680237-99680391
  hyper
  sarcoma vs. prostate,pancreas_gallbladder,uterine, non_cancer,lymphoid_neoplasm,multiple_myeloma,renal,thyroid, ovary,cervical,bladder_and_urothelial,colorectal,liver_bileduct, upper_gi,lung,breast,myeloid_neoplasm,head_and_neck,anorectal

SEQ ID NO: 478743 - DNA, 754 bp, Homo sapiens; identical to SEQ ID NO: 358912
  chr7:100202089-100202843
  hyper
  sarcoma vs. upper_gi,anorectal,bladder_and_urothelial, lung,breast,cervical

SEQ ID NO: 478744 - DNA, 278 bp, Homo sapiens
  chr7:100203058-100203336
  hyper
  sarcoma vs. head_and_neck,bladder_and_urothelial, cervical
cgcgggcctgtcacttgtgagtgcgccaggacttgaccttgccaaccacgacgaccgacacccctgcagggtcccatgggtgtgtgtggtcctccgtgctgtggtgtgaacgccttcaggaggggggcccagaggacgcgggaggtgggagtgggagctgctgcaggcacccagtaggagatgaggtgcaggcgcccaggggtgtcccgccgcgcagtccccgcctccgcccgccgccaggtcatcgcgctgaccttcgagaagtttgacctggagcc

SEQ ID NO: 478745 - DNA, 106 bp, Homo sapiens
  chr7:100203366-100203472
  hyper
  sarcoma vs. head_and_neck,bladder_and_urothelial, cervical
cgtgttcaacggagccgtgagcgacgactcccggaggctggggaagttctgcggcgacgcagtcccggggtgaggggcgggacctgggcgagtccgggagagagtc

SEQ ID NO: 478746 - DNA, 50 bp, Homo sapiens; identical to SEQ ID NO: 358915
  chr7:100203505-100203555
  hyper
  sarcoma vs. head_and_neck,bladder_and_urothelial, cervical

SEQ ID NO: 478747 - DNA, 487 bp, Homo sapiens; identical to SEQ ID NO: 350630
  chr7:101460542-101461029
  hyper
  sarcoma vs. head_and_neck,liver_bileduct,breast, pancreas_gallbladder,lung,uterine,ovary,colorectal,anorectal, prostate,bladder_and_urothelial,upper_gi,cervical,renal, myeloid_neoplasm,thyroid,non_cancer

SEQ ID NO: 478748 - DNA, 90 bp, Homo sapiens; identical to SEQ ID NO: 333226
  chr7:116759594-116759684
  hyper
  sarcoma vs. lymphoid_neoplasm,prostate, pancreas_gallbladder

SEQ ID NO: 478749 - DNA, 274 bp, Homo sapiens
  chr7:120969353-120969627
  hyper
  sarcoma vs. head_and_neck
gggcggcgctcctgggactggcccgcttgtgcgcgctgtgggcagccctgctcgtgctgttcccctacggagcccaaggaaactggatgtgagtatggaggtggcagggaagcatcgggtaggtggcaaaaggggtgcccaatcctagggaactttcaactgaggctgggggagaagggcggggacccttagacgagtgacctaatttttcggaaaacatctggaattggggagcggcttaacgctacgggcggccgtgtcttacaggtggttg

SEQ ID NO: 478750 - DNA, 227 bp, Homo sapiens; identical to SEQ ID NO: 461279
  chr7:121946146-121946373
  hyper
  sarcoma vs. thyroid,non_cancer

SEQ ID NO: 478751 - DNA, 277 bp, Homo sapiens; identical to SEQ ID NO: 333248
  chr7:127291492-127291769
  hyper
  sarcoma vs. liver_bileduct,pancreas_gallbladder, colorectal,lung,cervical,upper_gi,anorectal,head_and_neck, multiple_myeloma,renal,prostate,myeloid_neoplasm,uterine,breast, non_cancer,bladder_and_urothelial,lymphoid_neoplasm,ovary

SEQ ID NO: 478752 - DNA, 158 bp, Homo sapiens; identical to SEQ ID NO: 333265
  chr7:130741985-130742143
  hyper
  sarcoma vs. melanoma

SEQ ID NO: 478753 - DNA, 101 bp, Homo sapiens; identical to SEQ ID NO: 333266
  chr7:131240439-131240540
  hyper
  sarcoma vs. ovary

SEQ ID NO: 478754 - DNA, 4 bp, Homo sapiens
  chr7:131514717-131514721
  hyper
  sarcoma vs. multiple_myeloma
cgga

SEQ ID NO: 478755 - DNA, 198 bp, Homo sapiens; identical to SEQ ID NO: 463040
  chr7:139929854-139930052
  hyper
  sarcoma vs. ovary,cervical,thyroid

SEQ ID NO: 478756 - DNA, 362 bp, Homo sapiens; identical to SEQ ID NO: 345285
  chr7:139930346-139930708
  hyper
  sarcoma vs. ovary,cervical,thyroid

SEQ ID NO: 478757 - DNA, 209 bp, Homo sapiens; identical to SEQ ID NO: 333277
  chr7:140103670-140103879
  hyper
  sarcoma vs. prostate,liver_bileduct,pancreas_gallbladder, head_and_neck,breast,colorectal,bladder_and_urothelial,lung, upper_gi,cervical,multiple_myeloma

SEQ ID NO: 478758 - DNA, 94 bp, Homo sapiens
  chr7:143105734-143105828
  hyper
  sarcoma vs. breast,liver_bileduct,anorectal,lung, head_and_neck,upper_gi,bladder_and_urothelial,colorectal, prostate,cervical,non_cancer,multiple_myeloma, pancreas_gallbladder,renal,ovary,melanoma,uterine,thyroid
cggcttctgcaggggggtgctggccgggccccgggaaggggcggggcgcgggggttgggggcgcgggggcgggggtcggtaccttccttggcgc

SEQ ID NO: 478759 - DNA, 454 bp, Homo sapiens; identical to SEQ ID NO: 345290
  chr7:143105844-143106298
  hyper
  sarcoma vs. breast,liver_bileduct,anorectal,lung, head_and_neck,upper_gi,bladder_and_urothelial,colorectal, prostate,cervical,non_cancer,multiple_myeloma, pancreas_gallbladder,renal,ovary,melanoma,uterine,thyroid

SEQ ID NO: 478760 - DNA, 298 bp, Homo sapiens; identical to SEQ ID NO: 333287
  chr7:148394984-148395282
  hyper
  sarcoma vs. bladder_and_urothelial,upper_gi, multiple_myeloma

SEQ ID NO: 478761 - DNA, 437 bp, Homo sapiens; identical to SEQ ID NO: 333295
  chr7:150075217-150075654
  hyper
  sarcoma vs. liver_bileduct,pancreas_gallbladder,lung, breast

SEQ ID NO: 478762 - DNA, 846 bp, Homo sapiens; identical to SEQ ID NO: 333298
  chr7:150671471-150672317
  hyper
  sarcoma vs. ovary,lung,colorectal,non_cancer,uterine, prostate,bladder_and_urothelial,lymphoid_neoplasm,renal, myeloid_neoplasm,thyroid,breast,upper_gi,multiple_myeloma, pancreas_gallbladder

SEQ ID NO: 478763 - DNA, 100 bp, Homo sapiens
  chr7:151136933-151137033
  hyper
  sarcoma vs. anorectal
cgaaggcggagccccactcggtttccttggggttgagggacgcactcaccttccccgagcgctgcgccatggtgcgccccgccccttccgcgggtccccg

SEQ ID NO: 478764 - DNA, 121 bp, Homo sapiens; identical to SEQ ID NO: 358995
  chr7:151137113-151137234
  hyper
  sarcoma vs. anorectal

SEQ ID NO: 478765 - DNA, 312 bp, Homo sapiens; identical to SEQ ID NO: 345291
  chr7:156433208-156433520
  hyper
  sarcoma vs. colorectal,pancreas_gallbladder

SEQ ID NO: 478766 - DNA, 458 bp, Homo sapiens; identical to SEQ ID NO: 454495
  chr7:156433522-156433980
  hyper
  sarcoma vs. colorectal,pancreas_gallbladder

SEQ ID NO: 478767 - DNA, 108 bp, Homo sapiens; identical to SEQ ID NO: 333357
  chr8:6673921-6674029
  hyper
  sarcoma vs. liver_bileduct,renal,upper_gi, bladder_and_urothelial,breast,uterine,lung,lymphoid_neoplasm, multiple_myeloma,pancreas_gallbladder,cervical,colorectal, prostate,ovary,head_and_neck,non_cancer,thyroid

SEQ ID NO: 478768 - DNA, 287 bp, Homo sapiens; identical to SEQ ID NO: 333378
  chr8:17940762-17941049
  hyper
  sarcoma vs. melanoma,liver_bileduct

SEQ ID NO: 478769 - DNA, 414 bp, Homo sapiens; identical to SEQ ID NO: 333386
  chr8:22299385-22299799
  hyper
  sarcoma vs. lymphoid_neoplasm,pancreas_gallbladder

SEQ ID NO: 478770 - DNA, 31 bp, Homo sapiens
  chr8:22436798-22436829
  hyper
  sarcoma vs. liver_bileduct,lung,upper_gi, pancreas_gallbladder,anorectal,colorectal, bladder_and_urothelial,multiple_myeloma,breast,uterine,prostate, ovary,cervical,myeloid_neoplasm,thyroid,non_cancer,
  CONT. FROM ABOVE: head_and_neck,renal
cgcgcccctgtcggcgcggaaccctggcctc

SEQ ID NO: 478771 - DNA, 878 bp, Homo sapiens; identical to SEQ ID NO: 346966
  chr8:22436855-22437733
  hyper
  sarcoma vs. liver_bileduct,lung,upper_gi, pancreas_gallbladder,anorectal,colorectal, bladder_and_urothelial,multiple_myeloma,breast,uterine,prostate, ovary,cervical,myeloid_neoplasm,thyroid,non_cancer,
  CONT. FROM ABOVE: head_and_neck,renal

SEQ ID NO: 478772 - DNA, 51 bp, Homo sapiens; identical to SEQ ID NO: 359065
  chr8:22722458-22722509
  hyper
  sarcoma vs. myeloid_neoplasm,thyroid,uterine,non_cancer, renal,multiple_myeloma

SEQ ID NO: 478773 - DNA, 20 bp, Homo sapiens
  chr8:23020932-23020952
  hyper
  sarcoma vs. renal,colorectal,cervical,non_cancer, upper_gi,anorectal,pancreas_gallbladder,liver_bileduct, myeloid_neoplasm,prostate,multiple_myeloma,uterine,ovary
cgaacgaacgaacgaacgaa

SEQ ID NO: 478774 - DNA, 25 bp, Homo sapiens
  chr8:23021107-23021132
  hyper
  sarcoma vs. renal,colorectal,cervical,non_cancer, upper_gi,anorectal,pancreas_gallbladder,liver_bileduct, myeloid_neoplasm,prostate,multiple_myeloma,uterine,ovary
cggcccggtcgctcctgcccagccc

SEQ ID NO: 478775 - DNA, 127 bp, Homo sapiens; identical to SEQ ID NO: 345299
  chr8:23021590-23021717
  hyper
  sarcoma vs. renal,colorectal,cervical,non_cancer, upper_gi,anorectal,pancreas_gallbladder,liver_bileduct, myeloid_neoplasm,prostate,multiple_myeloma,uterine,ovary

SEQ ID NO: 478776 - DNA, 90 bp, Homo sapiens; identical to SEQ ID NO: 469458
  chr8:23082568-23082658
  hyper
  sarcoma vs. lymphoid_neoplasm,liver_bileduct, head_and_neck,lung,upper_gi,pancreas_gallbladder

SEQ ID NO: 478777 - DNA, 169 bp, Homo sapiens; identical to SEQ ID NO: 359069
  chr8:23082729-23082898
  hyper
  sarcoma vs. lymphoid_neoplasm,liver_bileduct, head_and_neck,lung,upper_gi,pancreas_gallbladder

SEQ ID NO: 478778 - DNA, 67 bp, Homo sapiens
  chr8:24816325-24816392
  hyper
  sarcoma vs. ovary
cgttttttttctttctttctttctttttttttttttttttttttctttttttccgcggctcctccct

SEQ ID NO: 478779 - DNA, 291 bp, Homo sapiens
  chr8:25908102-25908393
  hyper
  sarcoma vs. liver_bileduct
ggggtcagctgcaaatatggcaccatctagaatttcattccatttagcactaggcaacctcctcctccaacacacacacgcactcgcacaccatcacgatcacctccacctacactggcacacctcactcaggtggcaagagagaaaatccaggaaagtcacttgcatagagtgcacggatttcaagaagtctttgacggtgcaaactggacttctaatcatgggatctctccaaacacagcccaaggcctagaaattccatttctggctcacggaaccttccacccccac

SEQ ID NO: 478780 - DNA, 251 bp, Homo sapiens; identical to SEQ ID NO: 359083
  chr8:25908517-25908768
  hyper
  sarcoma vs. liver_bileduct

SEQ ID NO: 478781 - DNA, 41 bp, Homo sapiens; identical to SEQ ID NO: 333406
  chr8:25910878-25910919
  hyper
  sarcoma vs. renal,ovary,uterine,pancreas_gallbladder, colorectal

SEQ ID NO: 478782 - DNA, 311 bp, Homo sapiens; identical to SEQ ID NO: 350731
  chr8:26148757-26149068
  hyper
  sarcoma vs. ovary,pancreas_gallbladder, bladder_and_urothelial,uterine,head_and_neck,lymphoid_neoplasm, prostate,renal,colorectal,upper_gi,breast,cervical,lung, anorectal,non_cancer

SEQ ID NO: 478783 - DNA, 837 bp, Homo sapiens
  chr8:29205985-29206822
  hyper
  sarcoma vs. melanoma,ovary,colorectal
cgcggaaaaagaaagaaaaatcagcaaaatcgccttagcagttcaaccaaaggtcaacagcagcgtttccccagcagctgacaggtcaaatgggcaggaaacaactgcggggaacaaagccccccgctgtccggcaggggcgaacccggctcctccgcactgaacagttttgttgtgctttttggaggggagaggtttccgccccctttccagctcccttcctcccgggtggacaggtcggaagaggagcggaaaggaaaggaagggagggaggcggcgaaggcgcctgcgggggggaggagcggctctttgatgggtgtgggggggtctgaactgcctaccgggctcggaagcgcagaccctacccgcgcggaagaatgcgcggaatgcggcggcgggaggcggaggcgcagcgcggcggggggcgcccggaccccacgcgccctgcccgctccctagcccgagggccgcggacccaccctgccctgcaggtgtggcgggcgccaggtccctccagggactcggacagcacgcgatttttccaggatttccgactaccaaatgtgacaagacagtctcgccgccgagagtttcgccagggctcgctaaaatccggcacgcgccgccatcagatagtcgaaaatccgggctgaacaaaaggtgatcattctccgctgcccggatttgcaggcgctagaggaccggttccgcccggcgtcccccagatacccagtccttcagcctcccgctcccagagcctggatctagcccgggacggggattggccaccttccaagctgagcttggagttgggcagcgggaacgcagatacagatc

SEQ ID NO: 478784 - DNA, 218 bp, Homo sapiens
  chr8:37756358-37756576
  hyper
  sarcoma vs. ovary,prostate,upper_gi,liver_bileduct, breast,renal,melanoma,lung,cervical,uterine,thyroid, lymphoid_neoplasm,anorectal,pancreas_gallbladder,colorectal, head_and_neck
cgccccagatacggccccttcttccaagaagacccaaagctggcagagctgggcgggacagccgcagaaggggaagccaggtgagaacaccagcaccggccgagggctccgtcccgaaaggccttccccgctgctgcccggcttactctcgaagggtccagcgcccagaccgccctgccggaggggtccgcgcccccaggccgggccctcccctcccc

SEQ ID NO: 478785 - DNA, 355 bp, Homo sapiens; identical to SEQ ID NO: 201389
  chr8:37756610-37756965
  hyper
  sarcoma vs. ovary,prostate,upper_gi,liver_bileduct, breast,renal,melanoma,lung,cervical,uterine,thyroid, lymphoid_neoplasm,anorectal,pancreas_gallbladder,colorectal, head_and_neck

SEQ ID NO: 478786 - DNA, 371 bp, Homo sapiens
  chr8:37756967-37757338
  hyper
  sarcoma vs. ovary,prostate,upper_gi,liver_bileduct, breast,renal,melanoma,lung,cervical,uterine,thyroid, lymphoid_neoplasm,anorectal,pancreas_gallbladder,colorectal, head_and_neck
taacactccagaagcgaggagaagatcgccgcgactggcggcctccacggcccgccccggcgaccaggccactttaaggcttccggccacacccccgccaggccacgcccctcatggccaaggccacgcccctgcccgagccgcctgctccacctgctgcgccgcgccccgccccgccccgccccgccccgccggcctcagcagcgcgggcagctccgggcacccgggcgccggaggcggggctggcgcggccaggcaggcaggggatcacgtgcgcaggggcgggcgcatcgagaatctaatctgagaggtggtaggtgacggatggggtccccagctgccaaaggtcgcacggcgggaaggagctggcc

SEQ ID NO: 478787 - DNA, 234 bp, Homo sapiens; identical to SEQ ID NO: 333424
  chr8:41168659-41168893
  hyper

SEQ ID NO: 478788 - DNA, 540 bp, Homo sapiens
  chr8:41685769-41686309
  hyper
  sarcoma vs. prostate
cgctccgccccgctccgcccgtgctgggctgtggcctccacaccaagcagccgccctgggccgccttccttcgtctgtgcgtgcagcgccgcctccttcagcttaggcccgacactccatgaactctcattttccaccttctccgtctccagcttccaagctgcacagggccaggccgaggtacgtgatggcgggcactgaattacagatcccgtctgtggccgccagcctctgtgtcctgccacctcctccgagaggacatcaccgccaccaggtggagcgagtctcctcctcggcgctccaaccacgtgctgtttattactctgtggggattcccataccgaggcctcttcagttcctggaacagtagcactaaaaggctcctgagtgcctctgttaatttgattgttctggttcgcactacaatgaccgggctggagagggggcgctcgtaatgaaacaggaactgctcctcgcgcccgctccagagtcctttacatctttggggagagggcatacggggagctacatttcattttc

SEQ ID NO: 478789 - DNA, 112 bp, Homo sapiens
  chr8:49309646-49309758
  hyper
  sarcoma vs. colorectal,prostate,uterine,ovary,non_cancer, breast,multiple_myeloma
tttgattatttgtgttagcagttaatttagcaccgtggccacgtgtgccaaagctgcctccacttcctccgggctcccaacaaacggcacttttatgagatcctttcaaagc

SEQ ID NO: 478790 - DNA, 164 bp, Homo sapiens; identical to SEQ ID NO: 350744
  chr8:49309797-49309961
  hyper
  sarcoma vs. colorectal,prostate,uterine,ovary,non_cancer, breast,multiple_myeloma

SEQ ID NO: 478791 - DNA, 117 bp, Homo sapiens; identical to SEQ ID NO: 453446
  chr8:56014011-56014128
  hyper
  sarcoma vs. melanoma

SEQ ID NO: 478792 - DNA, 103 bp, Homo sapiens; identical to SEQ ID NO: 456164
  chr8:60030067-60030170
  hyper
  sarcoma vs. myeloid_neoplasm,thyroid,non_cancer

SEQ ID NO: 478793 - DNA, 239 bp, Homo sapiens; identical to SEQ ID NO: 453448
  chr8:60030908-60031147
  hyper
  sarcoma vs. non_cancer,myeloid_neoplasm,thyroid

SEQ ID NO: 478794 - DNA, 85 bp, Homo sapiens; identical to SEQ ID NO: 461300
  chr8:65499649-65499734
  hyper
  sarcoma vs. myeloid_neoplasm,non_cancer,multiple_myeloma

SEQ ID NO: 478795 - DNA, 43 bp, Homo sapiens; identical to SEQ ID NO: 453462
  chr8:69242761-69242804
  hyper
  sarcoma vs. melanoma,ovary,cervical,uterine, lymphoid_neoplasm,head_and_neck,anorectal,upper_gi, pancreas_gallbladder,breast,prostate,renal,colorectal

SEQ ID NO: 478796 - DNA, 57 bp, Homo sapiens; identical to SEQ ID NO: 453463
  chr8:69243011-69243068
  hyper
  sarcoma vs. melanoma,ovary,cervical,uterine, lymphoid_neoplasm,head_and_neck,anorectal,upper_gi, pancreas_gallbladder,breast,prostate,renal,colorectal

SEQ ID NO: 478797 - DNA, 311 bp, Homo sapiens; identical to SEQ ID NO: 333477
  chr8:71316520-71316831
  hyper
  sarcoma vs. renal,upper_gi,bladder_and_urothelial,lung, pancreas_gallbladder,colorectal,cervical

SEQ ID NO: 478798 - DNA, 8 bp, Homo sapiens
  chr8:72755240-72755248
  hyper
  sarcoma vs. prostate
gttctgtc

SEQ ID NO: 478799 - DNA, 55 bp, Homo sapiens; identical to SEQ ID NO: 467778
  chr8:97156910-97156965
  hyper
  sarcoma vs. melanoma

SEQ ID NO: 478800 - DNA, 4 bp, Homo sapiens
  chr8:97166422-97166426
  hyper
  sarcoma vs. melanoma
cgcc

SEQ ID NO: 478801 - DNA, 23 bp, Homo sapiens
  chr8:97166516-97166539
  hyper
  sarcoma vs. melanoma
aggaacgttgtccagcgccgccc

SEQ ID NO: 478802 - DNA, 78 bp, Homo sapiens
  chr8:97166796-97166874
  hyper
  sarcoma vs. melanoma,renal
cggcattccacacctcgagggctcggctcgattcagtcccctggtccaaagagtgtcgtttgacccgggttattcaat

SEQ ID NO: 478803 - DNA, 276 bp, Homo sapiens
  chr8:97166903-97167179
  hyper
  sarcoma vs. melanoma,renal
ccttttacttaaaagcccccagggattactgttgatttgctctaagacctttggtgcacgcagtagtcctagcaggaaacaaaagttctcgttctgccctgtttctatcataccatcttcctccccacagtctccacctcattcccttcttccttctccgccaccgccccagaaagacgtcaccactttcgaggaggtgtgtaagaacctcaaggactccagctaagaaaaacatgtggtgttagggcctccgatgcagtgccctgcgttccccgc

SEQ ID NO: 478804 - DNA, 214 bp, Homo sapiens; identical to SEQ ID NO: 350792
  chr8:97167223-97167437
  hyper
  sarcoma vs. melanoma,renal

SEQ ID NO: 478805 - DNA, 245 bp, Homo sapiens; identical to SEQ ID NO: 469487
  chr8:101661596-101661841
  hyper
  sarcoma vs. ovary,cervical,uterine

SEQ ID NO: 478806 - DNA, 2 bp, Homo sapiens
  chr8:101661919-101661921
  hyper
  sarcoma vs. ovary,cervical,uterine
cc

SEQ ID NO: 478807 - DNA, 62 bp, Homo sapiens; identical to SEQ ID NO: 350800
  chr8:101661991-101662053
  hyper
  sarcoma vs. ovary,cervical,uterine

SEQ ID NO: 478808 - DNA, 33 bp, Homo sapiens
  chr8:102504696-102504729
  hyper
  sarcoma vs. breast,head_and_neck,lung,anorectal,cervical, colorectal,upper_gi,prostate,pancreas_gallbladder,uterine, non_cancer,myeloid_neoplasm,thyroid,ovary, bladder_and_urothelial
ccactttctgctctgtgtctgcccattgccacg

SEQ ID NO: 478809 - DNA, 143 bp, Homo sapiens; identical to SEQ ID NO: 350806
  chr8:102504760-102504903
  hyper
  sarcoma vs. breast,head_and_neck,lung,anorectal,cervical, colorectal,upper_gi,prostate,pancreas_gallbladder,uterine, non_cancer,myeloid_neoplasm,thyroid,ovary, bladder_and_urothelial

SEQ ID NO: 478810 - DNA, 41 bp, Homo sapiens
  chr8:102506365-102506406
  hyper
  sarcoma vs. ovary
ggagagggccggtgccccaaggccgcgggccgctgggcctg

SEQ ID NO: 478811 - DNA, 211 bp, Homo sapiens; identical to SEQ ID NO: 347008
  chr8:121824481-121824692
  hyper
  sarcoma vs. ovary,liver_bileduct,colorectal

SEQ ID NO: 478812 - DNA, 79 bp, Homo sapiens; identical to SEQ ID NO: 333566
  chr8:124778505-124778584
  hyper
  sarcoma vs. melanoma,liver_bileduct, bladder_and_urothelial,upper_gi,pancreas_gallbladder, head_and_neck,breast,cervical,lymphoid_neoplasm, multiple_myeloma,prostate,anorectal,colorectal,renal,lung

SEQ ID NO: 478813 - DNA, 813 bp, Homo sapiens
  chr8:142139026-142139839
  hyper
  sarcoma vs. multiple_myeloma,lymphoid_neoplasm,renal
cggtcccccggcggtgaccccgcgcgcctgtggccggggatcgcgcccgagctcaggcaggtgccctggagcagcgccctgctcccctcccctcttctctcctctccccgcccggggcccttggtgtgagacatgtcttttgagagctgcgaacttggtccgccggccgggaatctgggggtgccgcccctcggagagtctctggggcctctctcttcagtcgctcccatcttgggcaggtgcttctgaaggtggggtgcaccagacaacgggcggaagccgccggagcctcacggtctagcgggcccagccctcgctgctgaaatgatttcattctttatgctgggatgtgttgtcccctgagtagtgggttttgcaccaggcacagaataacgagagagcaatcttagagttagccgccggcctcgcgtattctgcatgaacccctttgcgatgaagcctatagctatttttctcccttgcggtaccacccccacccccaacccttcctccatctctgcaccctcgcagccaaagtgacaacttcatctcccttctgctgggaaagcggcagttttggaaattctcgttttcctttttcttccccagcttttcttaattctgtaacgctggctttccctggaatccatctgtgtctctggtttcctcctggtccgcctgtctgtgacaccgtgactgggtcatgttacctagagatcccggcgtcactggccagccgtctgcacaggtccgttcatctctttgcagacaacagcatagaaaggcagagaggcttctgagtatttaaatgac

SEQ ID NO: 478814 - DNA, 69 bp, Homo sapiens; identical to SEQ ID NO: 333583
  chr8:143483659-143483728
  hyper
  sarcoma vs. melanoma,prostate,breast

SEQ ID NO: 478815 - DNA, 296 bp, Homo sapiens; identical to SEQ ID NO: 117271
  chr8:143556722-143557018
  hyper
  sarcoma vs. ovary,head_and_neck,uterine,colorectal

SEQ ID NO: 478816 - DNA, 93 bp, Homo sapiens; identical to SEQ ID NO: 333596
  chr8:145692498-145692591
  hyper
  sarcoma vs. lung,head_and_neck,breast,upper_gi,renal, anorectal,uterine,ovary,colorectal,prostate, pancreas_gallbladder

SEQ ID NO: 478817 - DNA, 77 bp, Homo sapiens; identical to SEQ ID NO: 345318
  chr8:145698674-145698751
  hyper
  sarcoma vs. anorectal,cervical,thyroid,ovary,non_cancer, head_and_neck,uterine,multiple_myeloma,renal,lung,upper_gi, colorectal,myeloid_neoplasm,prostate,breast

SEQ ID NO: 478818 - DNA, 429 bp, Homo sapiens; identical to SEQ ID NO: 333598
  chr8:145733644-145734073
  hyper
  sarcoma vs. melanoma,liver_bileduct,anorectal

SEQ ID NO: 478819 - DNA, 224 bp, Homo sapiens; identical to SEQ ID NO: 333625
  chr9:16133902-16134126
  hyper
  sarcoma vs. lymphoid_neoplasm

SEQ ID NO: 478820 - DNA, 55 bp, Homo sapiens; identical to SEQ ID NO: 359280
  chr9:16154771-16154826
  hyper
  sarcoma vs. thyroid

SEQ ID NO: 478821 - DNA, 194 bp, Homo sapiens; identical to SEQ ID NO: 333648
  chr9:34379701-34379895
  hyper
  sarcoma vs. lymphoid_neoplasm,cervical, pancreas_gallbladder,anorectal,upper_gi,bladder_and_urothelial, uterine,ovary,liver_bileduct,breast,multiple_myeloma,renal

SEQ ID NO: 478822 - DNA, 265 bp, Homo sapiens
  chr9:34591191-34591456
  hyper
cggccagctaggacttcaggacacacagcaaactagctgcgccccgctgagggtcagcgcacagccgcccacacaaggtgtcctctccccgggctctctgggccgccggcctcctgcttcccgtgccgcagaccgggattagactgtggacgcggggaaggaagggggcgttgcgacgggatcttgaggggagcaggacttgcccctgcccctgcggcgaagctctaggccctggcaaggttcggtacaccgggggccgctcctc

SEQ ID NO: 478823 - DNA, 31 bp, Homo sapiens; identical to SEQ ID NO: 359299
  chr9:34591656-34591687
  hyper

SEQ ID NO: 478824 - DNA, 894 bp, Homo sapiens; identical to SEQ ID NO: 333655
  chr9:35756575-35757469
  hyper
  sarcoma vs. uterine,pancreas_gallbladder,renal,upper_gi, colorectal,multiple_myeloma,thyroid

SEQ ID NO: 478825 - DNA, 31 bp, Homo sapiens
  chr9:71735700-71735731
  hyper
  sarcoma vs. head_and_neck,pancreas_gallbladder,ovary, liver_bileduct,cervical,lung,breast,colorectal,upper_gi, prostate,uterine
cgccctcacctattgtccgggtggaggaacc

SEQ ID NO: 478826 - DNA, 465 bp, Homo sapiens; identical to SEQ ID NO: 350870
  chr9:71735786-71736251
  hyper
  sarcoma vs. head_and_neck,pancreas_gallbladder,ovary, liver_bileduct,cervical,lung,breast,colorectal,upper_gi, prostate,uterine

SEQ ID NO: 478827 - DNA, 247 bp, Homo sapiens; identical to SEQ ID NO: 333677
  chr9:79319779-79320026
  hyper
  sarcoma vs. lymphoid_neoplasm,liver_bileduct,breast, upper_gi,uterine,pancreas_gallbladder,cervical, bladder_and_urothelial,head_and_neck

SEQ ID NO: 478828 - DNA, 473 bp, Homo sapiens; identical to SEQ ID NO: 472597
  chr9:79630544-79631017
  hyper
  sarcoma vs. multiple_myeloma,breast,non_cancer, myeloid_neoplasm,thyroid

SEQ ID NO: 478829 - DNA, 218 bp, Homo sapiens; identical to SEQ ID NO: 333696
  chr9:88355794-88356012
  hyper
  sarcoma vs. head_and_neck,melanoma,lung, lymphoid_neoplasm,ovary,breast

SEQ ID NO: 478830 - DNA, 93 bp, Homo sapiens
  chr9:89517563-89517656
  hyper
  sarcoma vs. myeloid_neoplasm,non_cancer
cgtgaatgcggcccttccccaccacacacaggctctctcccaccccctgccagctatccctgctctgacctccccgggcctccctaaggggac

SEQ ID NO: 478831 - DNA, 183 bp, Homo sapiens
  chr9:89517860-89518043
  hyper
  sarcoma vs. myeloid_neoplasm,non_cancer
cgcggcaccaagacccccatttctatgcaccctggaaagggtgattaatttaaagtgagtggagtctgtttctttaagacaagctcataaatcgtgaaagatcaccacttcttttcaaaagcctctccacggtctgagtctcccttctgggtcagtaaagtcattgaagctttaacggcatgc

SEQ ID NO: 478832 - DNA, 6 bp, Homo sapiens
  chr9:89518072-89518078
  hyper
  sarcoma vs. myeloid_neoplasm,non_cancer
ggcacc

SEQ ID NO: 478833 - DNA, 156 bp, Homo sapiens; identical to SEQ ID NO: 453504
  chr9:93955774-93955930
  hyper
  sarcoma vs. pancreas_gallbladder,myeloid_neoplasm

SEQ ID NO: 478834 - DNA, 268 bp, Homo sapiens; identical to SEQ ID NO: 453505
  chr9:93956177-93956445
  hyper
  sarcoma vs. pancreas_gallbladder,myeloid_neoplasm

SEQ ID NO: 478835 - DNA, 396 bp, Homo sapiens
  chr9:98784377-98784773
  hyper
  sarcoma vs. ovary
accaagtcctagagagaatttctccaaaatatttcctggatccccctgccaagggccctgtcccgcccttccagctcccaactggatgcctgcagacctctccccgggttccgaggctctggcctcctccctccctaatccattttccacaccgcttccccgggagcccgttaaaatacaccgggaccgcggcgggtgcaagcctcctgtatctccacatagcaggctaaggggaattgggtagggaataaaggctgcaggggacatcggctggcaggtatgaagcccgtattgtgtgtcgtttgttaaacacttccagtggattttctcgtttaatctgcccaacaacgcttctgggccggtattcgtattgttttatagagggagaaactgagg

SEQ ID NO: 478836 - DNA, 1 bp, Homo sapiens
  chr9:98784927-98784928
  hyper
  sarcoma vs. ovary
c

SEQ ID NO: 478837 - DNA, 178 bp, Homo sapiens; identical to SEQ ID NO: 350911
  chr9:99637706-99637884
  hyper
  sarcoma vs. head_and_neck,lung,liver_bileduct,colorectal, breast,ovary

SEQ ID NO: 478838 - DNA, 316 bp, Homo sapiens; identical to SEQ ID NO: 333725
  chr9:99638097-99638413
  hyper
  sarcoma vs. lung,ovary,colorectal,breast,upper_gi, pancreas_gallbladder,head_and_neck,renal,prostate,uterine, liver_bileduct,anorectal,bladder_and_urothelial,cervical

SEQ ID NO: 478839 - DNA, 99 bp, Homo sapiens; identical to SEQ ID NO: 333730
  chr9:100263437-100263536
  hyper
  sarcoma vs. pancreas_gallbladder,ovary,lung,cervical, uterine,anorectal,prostate,colorectal,liver_bileduct,breast, upper_gi,head_and_neck,bladder_and_urothelial,multiple_myeloma

SEQ ID NO: 478840 - DNA, 183 bp, Homo sapiens; identical to SEQ ID NO: 475919
  chr9:102586462-102586645
  hyper
  sarcoma vs. head_and_neck,bladder_and_urothelial, multiple_myeloma,ovary,anorectal,non_cancer,uterine, myeloid_neoplasm,thyroid,cervical,pancreas_gallbladder,renal

SEQ ID NO: 478841 - DNA, 227 bp, Homo sapiens; identical to SEQ ID NO: 347046
  chr9:102586985-102587212
  hyper
  sarcoma vs. head_and_neck,bladder_and_urothelial, multiple_myeloma,ovary,anorectal,non_cancer,uterine, myeloid_neoplasm,thyroid,cervical,pancreas_gallbladder,renal

SEQ ID NO: 478842 - DNA, 58 bp, Homo sapiens; identical to SEQ ID NO: 467879
  chr9:110249882-110249940
  hyper

SEQ ID NO: 478843 - DNA, 123 bp, Homo sapiens; identical to SEQ ID NO: 467880
  chr9:110250497-110250620
  hyper

SEQ ID NO: 478844 - DNA, 202 bp, Homo sapiens; identical to SEQ ID NO: 359384
  chr9:110250630-110250832
  hyper

SEQ ID NO: 478845 - DNA, 61 bp, Homo sapiens
  chr9:112081274-112081335
  hyper
  sarcoma vs. breast,thyroid,prostate,colorectal, non_cancer
cgggaaggcctatatacttccttggaagtccgggtatgttatttcttcccttgacatcctc

SEQ ID NO: 478846 - DNA, 131 bp, Homo sapiens
  chr9:112081563-112081694
  hyper
  sarcoma vs. breast,thyroid,prostate,colorectal, non_cancer
gggggtgcaaccacctgtgggcgggtgcccgggacgcaggcccaggcgccgccgccctgaggtgccccgccgaccccacgcacggtgcccaagggagaaagtcaggcgcgcctggccccccgggcaccccg

SEQ ID NO: 478847 - DNA, 355 bp, Homo sapiens
  chr9:112081773-112082128
  hyper
  sarcoma vs. breast,thyroid,prostate,colorectal, non_cancer
ctcccaagtcaccctacccgctgcgaggaggctgcggggcagatggggctcagggaatgggaatggggtgtatccagaagggatcagcagagagcagaaatggtctaacccccgcctcccaaacttggggcgcctgccgagcagcaagcgaggggatctcctctctgctgtctcatcaaggcctgatggcgagtttgaggggggacaagctggacaccccaggacggcctcacattgatttgagattttctacccaataacccagtatcaggaagacccctgctggaagctagggacggaaggggagcgccggccacccacaccagggggggcggggtctcgggacttggggacc

SEQ ID NO: 478848 - DNA, 53 bp, Homo sapiens
  chr9:112081641-112081694
  hyper
  sarcoma vs. breast,prostate,thyroid,colorectal, non_cancer
cgcacggtgcccaagggagaaagtcaggcgcgcctggccccccgggcaccccg

SEQ ID NO: 478849 - DNA, 860 bp, Homo sapiens; identical to SEQ ID NO: 350926
  chr9:112081773-112082633
  hyper
  sarcoma vs. breast,prostate,thyroid,colorectal, non_cancer

SEQ ID NO: 478850 - DNA, 178 bp, Homo sapiens; identical to SEQ ID NO: 333756
  chr9:113017465-113017643
  hyper
  sarcoma vs. liver_bileduct,head_and_neck,lung

SEQ ID NO: 478851 - DNA, 301 bp, Homo sapiens; identical to SEQ ID NO: 475922
  chr9:116918462-116918763
  hyper
  sarcoma vs. liver_bileduct,head_and_neck,ovary

SEQ ID NO: 478852 - DNA, 4 bp, Homo sapiens
  chr9:116918888-116918892
  hyper
  sarcoma vs. liver_bileduct,head_and_neck,ovary
tcac

SEQ ID NO: 478853 - DNA, 268 bp, Homo sapiens; identical to SEQ ID NO: 333769
  chr9:124857529-124857797
  hyper
  sarcoma vs. lymphoid_neoplasm,bladder_and_urothelial, multiple_myeloma,renal,prostate,uterine,breast,lung,upper_gi, cervical,ovary,pancreas_gallbladder

SEQ ID NO: 478854 - DNA, 360 bp, Homo sapiens; identical to SEQ ID NO: 372222
  chr9:126771808-126772168
  hyper
  sarcoma vs. anorectal

SEQ ID NO: 478855 - DNA, 227 bp, Homo sapiens; identical to SEQ ID NO: 359415
  chr9:126782445-126782672
  hyper
  sarcoma vs. uterine,myeloid_neoplasm

SEQ ID NO: 478856 - DNA, 32 bp, Homo sapiens; identical to SEQ ID NO: 350939
  chr9:126783540-126783572
  hyper
  sarcoma vs. myeloid_neoplasm,bladder_and_urothelial, renal,uterine,anorectal,non_cancer,multiple_myeloma

SEQ ID NO: 478857 - DNA, 17 bp, Homo sapiens
  chr9:129381068-129381085
  hyper
  sarcoma vs. ovary,bladder_and_urothelial,cervical
cggaaggggggagggtc

SEQ ID NO: 478858 - DNA, 43 bp, Homo sapiens; identical to SEQ ID NO: 469515
  chr9:130689378-130689421
  hyper
  sarcoma vs. anorectal,cervical,ovary,thyroid,non_cancer, head_and_neck,lung

SEQ ID NO: 478859 - DNA, 419 bp, Homo sapiens; identical to SEQ ID NO: 469516
  chr9:130689749-130690168
  hyper
  sarcoma vs. anorectal,cervical,ovary,thyroid,non_cancer, head_and_neck,lung

SEQ ID NO: 478860 - DNA, 17 bp, Homo sapiens
  chr9:130690197-130690214
  hyper
  sarcoma vs. anorectal,cervical,ovary,thyroid,non_cancer, head_and_neck,lung
cgatctgtccaccatcc

SEQ ID NO: 478861 - DNA, 644 bp, Homo sapiens; identical to SEQ ID NO: 333807
  chr9:132647794-132648438
  hyper
  sarcoma vs. melanoma

SEQ ID NO: 478862 - DNA, 141 bp, Homo sapiens
  chr9:133308607-133308748
  hyper
  sarcoma vs. ovary
cgggagaaggacgggcagcgcgtgggcggaactgcaggggctggcagggaggtctgagttacgcggatgggccacgctccgaccgcacccccgagtccgcctgtccgtgtgtctgtgccgcccgcaggacgtgcttccggc

SEQ ID NO: 478863 - DNA, 68 bp, Homo sapiens
  chr9:133308769-133308837
  hyper
  sarcoma vs. ovary
cgggcggcccctctacgctgcagtaccggctgctgccgctgcccctgggcgtgcgcgcccaccacgac

SEQ ID NO: 478864 - DNA, 199 bp, Homo sapiens; identical to SEQ ID NO: 359448
  chr9:133309052-133309251
  hyper
  sarcoma vs. ovary

SEQ ID NO: 478865 - DNA, 630 bp, Homo sapiens; identical to SEQ ID NO: 345338
  chr9:135286324-135286954
  hyper
  sarcoma vs. pancreas_gallbladder,multiple_myeloma

SEQ ID NO: 478866 - DNA, 133 bp, Homo sapiens; identical to SEQ ID NO: 333841
  chr9:139703274-139703407
  hyper
  sarcoma vs. liver_bileduct,head_and_neck,lung,melanoma

SEQ ID NO: 478867 - DNA, 520 bp, Homo sapiens; identical to SEQ ID NO: 350968
  chr9:139948370-139948890
  hyper
  sarcoma vs. lung,breast,colorectal,head_and_neck

SEQ ID NO: 478868 - DNA, 622 bp, Homo sapiens; identical to SEQ ID NO: 336684
  chrX:2815904-2816526
  hyper
  sarcoma vs. head_and_neck,pancreas_gallbladder,breast, lung,liver_bileduct,renal,colorectal,uterine,multiple_myeloma, prostate,cervical,anorectal,bladder_and_urothelial,ovary

SEQ ID NO: 478869 - DNA, 117 bp, Homo sapiens; identical to SEQ ID NO: 456206
  chrX:15755988-15756105
  hyper
  sarcoma vs. prostate,head_and_neck, bladder_and_urothelial

SEQ ID NO: 478870 - DNA, 300 bp, Homo sapiens; identical to SEQ ID NO: 352654
  chrX:15756366-15756666
  hyper
  sarcoma vs. prostate,head_and_neck, bladder_and_urothelial

SEQ ID NO: 478871 - DNA, 281 bp, Homo sapiens; identical to SEQ ID NO: 336717
  chrX:40033593-40033874
  hyper
  sarcoma vs. melanoma

SEQ ID NO: 478872 - DNA, 633 bp, Homo sapiens; identical to SEQ ID NO: 368961
  chr1:1981183-1981816
  hypo
  sarcoma vs. lung

SEQ ID NO: 478873 - DNA, 331 bp, Homo sapiens; identical to SEQ ID NO: 477847
  chr1:1981818-1982149
  hypo
  sarcoma vs. lung

SEQ ID NO: 478874 - DNA, 162 bp, Homo sapiens; identical to SEQ ID NO: 477848
  chr1:1981654-1981816
  hypo
  sarcoma vs. liver_bileduct

SEQ ID NO: 478875 - DNA, 494 bp, Homo sapiens; identical to SEQ ID NO: 477849
  chr1:1981818-1982312
  hypo
  sarcoma vs. liver_bileduct

SEQ ID NO: 478876 - DNA, 198 bp, Homo sapiens; identical to SEQ ID NO: 368963
  chr1:1982427-1982625
  hypo
  sarcoma vs. liver_bileduct

SEQ ID NO: 478877 - DNA, 71 bp, Homo sapiens; identical to SEQ ID NO: 336909
  chr1:10692421-10692492
  hypo
  sarcoma vs. melanoma

SEQ ID NO: 478878 - DNA, 182 bp, Homo sapiens; identical to SEQ ID NO: 352788
  chr1:10692798-10692980
  hypo
  sarcoma vs. lymphoid_neoplasm,melanoma,lung, pancreas_gallbladder,upper_gi,head_and_neck,renal,breast, liver_bileduct,prostate,cervical,colorectal,anorectal

SEQ ID NO: 478879 - DNA, 53 bp, Homo sapiens; identical to SEQ ID NO: 462206
  chr1:11538821-11538874
  hypo
  sarcoma vs. melanoma,cervical,ovary,prostate,anorectal, breast

SEQ ID NO: 478880 - DNA, 221 bp, Homo sapiens; identical to SEQ ID NO: 337053
  chr1:45112018-45112239
  hypo
  sarcoma vs. lymphoid_neoplasm,melanoma,liver_bileduct

SEQ ID NO: 478881 - DNA, 268 bp, Homo sapiens; identical to SEQ ID NO: 337074
  chr1:51439584-51439852
  hypo
  sarcoma vs. lymphoid_neoplasm,colorectal

SEQ ID NO: 478882 - DNA, 323 bp, Homo sapiens; identical to SEQ ID NO: 455526
  chr1:52194968-52195291
  hypo
  sarcoma vs. lymphoid_neoplasm,pancreas_gallbladder,renal, lung,ovary,bladder_and_urothelial,uterine,myeloid_neoplasm, thyroid,upper_gi,non_cancer,multiple_myeloma,liver_bileduct, colorectal,melanoma

SEQ ID NO: 478883 - DNA, 52 bp, Homo sapiens; identical to SEQ ID NO: 477885
  chr1:52195239-52195291
  hypo
  sarcoma vs. pancreas_gallbladder,lymphoid_neoplasm,ovary, lung,renal,bladder_and_urothelial,multiple_myeloma,uterine, upper_gi,liver_bileduct,myeloid_neoplasm,non_cancer,thyroid

SEQ ID NO: 478884 - DNA, 24 bp, Homo sapiens
  chr1:67773109-67773133
  hypo
  sarcoma vs. melanoma
cgtctctatggctgtgaacgctga

SEQ ID NO: 478885 - DNA, 47 bp, Homo sapiens; identical to SEQ ID NO: 349260
  chr1:67773780-67773827
  hypo
  sarcoma vs. melanoma

SEQ ID NO: 478886 - DNA, 330 bp, Homo sapiens; identical to SEQ ID NO: 362519
  chr1:114522986-114523316
  hypo
  sarcoma vs. bladder_and_urothelial

SEQ ID NO: 478887 - DNA, 203 bp, Homo sapiens; identical to SEQ ID NO: 477906
  chr1:156594227-156594430
  hypo
  sarcoma vs. anorectal,ovary,uterine

SEQ ID NO: 478888 - DNA, 151 bp, Homo sapiens; identical to SEQ ID NO: 331054
  chr1:184722819-184722970
  hypo
  sarcoma vs. breast,multiple_myeloma,cervical, lymphoid_neoplasm,upper_gi,liver_bileduct,pancreas_gallbladder, renal,colorectal,bladder_and_urothelial,lung,ovary,prostate, non_cancer,melanoma,uterine,anorectal

SEQ ID NO: 478889 - DNA, 255 bp, Homo sapiens; identical to SEQ ID NO: 331068
  chr1:200379717-200379972
  hypo
  sarcoma vs. lung,cervical,breast,head_and_neck,anorectal, prostate,lymphoid_neoplasm,bladder_and_urothelial, liver_bileduct,colorectal,renal,pancreas_gallbladder,ovary

SEQ ID NO: 478890 - DNA, 138 bp, Homo sapiens
  chr1:202531802-202531940
  hypo
  sarcoma vs. upper_gi,lung
cgaaatacttcttagaaaaggcgcaaactacccctgagcattaccttctccccactactttgttctcaaaaccaatttttatctttaatattatctcccacaggttggaatcgggaggtagtaatcctacaaccagtg

SEQ ID NO: 478891 - DNA, 279 bp, Homo sapiens; identical to SEQ ID NO: 331104
  chr1:214453844-214454123
  hypo
  sarcoma vs. lung,ovary,liver_bileduct,uterine,renal

SEQ ID NO: 478892 - DNA, 118 bp, Homo sapiens; identical to SEQ ID NO: 337377
  chr1:231046066-231046184
  hypo
  sarcoma vs. melanoma

SEQ ID NO: 478893 - DNA, 588 bp, Homo sapiens; identical to SEQ ID NO: 455574
  chr1:231175062-231175650
  hypo
  sarcoma vs. melanoma

SEQ ID NO: 478894 - DNA, 286 bp, Homo sapiens; identical to SEQ ID NO: 455575
  chr1:231175692-231175978
  hypo
  sarcoma vs. melanoma

SEQ ID NO: 478895 - DNA, 53 bp, Homo sapiens; identical to SEQ ID NO: 337386
  chr1:233799555-233799608
  hypo
  sarcoma vs. lung

SEQ ID NO: 478896 - DNA, 175 bp, Homo sapiens; identical to SEQ ID NO: 464082
  chr1:234736252-234736427
  hypo
  sarcoma vs. melanoma,breast,bladder_and_urothelial, pancreas_gallbladder,colorectal,liver_bileduct,anorectal

SEQ ID NO: 478897 - DNA, 667 bp, Homo sapiens; identical to SEQ ID NO: 455580
  chr10:6621854-6622521
  hypo
  sarcoma vs. melanoma,ovary

SEQ ID NO: 478898 - DNA, 87 bp, Homo sapiens; identical to SEQ ID NO: 350979
  chr10:6622706-6622793
  hypo
  sarcoma vs. melanoma,ovary

SEQ ID NO: 478899 - DNA, 157 bp, Homo sapiens; identical to SEQ ID NO: 340584
  chr10:15828305-15828462
  hypo
  sarcoma vs. melanoma,lung,liver_bileduct, pancreas_gallbladder

SEQ ID NO: 478900 - DNA, 137 bp, Homo sapiens; identical to SEQ ID NO: 340693
  chr10:81142199-81142336
  hypo
  sarcoma vs. melanoma,lymphoid_neoplasm,lung, head_and_neck,prostate,breast,pancreas_gallbladder

SEQ ID NO: 478901 - DNA, 233 bp, Homo sapiens; identical to SEQ ID NO: 464100
  chr10:112403994-112404227
  hypo
  sarcoma vs. prostate

SEQ ID NO: 478902 - DNA, 129 bp, Homo sapiens; identical to SEQ ID NO: 477962
  chr10:134209485-134209614
  hypo
  sarcoma vs. cervical,colorectal,uterine, pancreas_gallbladder

SEQ ID NO: 478903 - DNA, 126 bp, Homo sapiens; identical to SEQ ID NO: 359726
  chr10:134209650-134209776
  hypo
  sarcoma vs. cervical,colorectal,uterine, pancreas_gallbladder

SEQ ID NO: 478904 - DNA, 258 bp, Homo sapiens; identical to SEQ ID NO: 354658
  chr11:859386-859644
  hypo
  sarcoma vs. lymphoid_neoplasm

SEQ ID NO: 478905 - DNA, 706 bp, Homo sapiens; identical to SEQ ID NO: 474530
  chr11:1535842-1536548
  hypo
  sarcoma vs. melanoma

SEQ ID NO: 478906 - DNA, 95 bp, Homo sapiens; identical to SEQ ID NO: 365576
  chr11:1536583-1536678
  hypo
  sarcoma vs. melanoma

SEQ ID NO: 478907 - DNA, 151 bp, Homo sapiens; identical to SEQ ID NO: 340982
  chr11:10519332-10519483
  hypo
  sarcoma vs. melanoma,lymphoid_neoplasm,breast,renal, pancreas_gallbladder,prostate,lung,uterine,colorectal,ovary

SEQ ID NO: 478908 - DNA, 203 bp, Homo sapiens; identical to SEQ ID NO: 475302
  chr11:13300232-13300435
  hypo
  sarcoma vs. ovary

SEQ ID NO: 478909 - DNA, 156 bp, Homo sapiens; identical to SEQ ID NO: 341004
  chr11:13334715-13334871
  hypo
  sarcoma vs. melanoma,liver_bileduct

SEQ ID NO: 478910 - DNA, 384 bp, Homo sapiens; identical to SEQ ID NO: 334231
  chr11:32851566-32851950
  hypo
  sarcoma vs. lung,liver_bileduct,bladder_and_urothelial

SEQ ID NO: 478911 - DNA, 432 bp, Homo sapiens; identical to SEQ ID NO: 477978
  chr11:57243735-57244167
  hypo

SEQ ID NO: 478912 - DNA, 231 bp, Homo sapiens; identical to SEQ ID NO: 468684
  chr11:61062458-61062689
  hypo
  sarcoma vs. thyroid,myeloid_neoplasm,non_cancer

SEQ ID NO: 478913 - DNA, 176 bp, Homo sapiens; identical to SEQ ID NO: 334274
  chr11:61659371-61659547
  hypo
  sarcoma vs. lung,ovary,lymphoid_neoplasm,cervical, upper_gi,pancreas_gallbladder,head_and_neck,breast,colorectal, prostate,renal,bladder_and_urothelial,uterine

SEQ ID NO: 478914 - DNA, 374 bp, Homo sapiens; identical to SEQ ID NO: 341095
  chr11:63908860-63909234
  hypo
  sarcoma vs. melanoma,head_and_neck

SEQ ID NO: 478915 - DNA, 751 bp, Homo sapiens; identical to SEQ ID NO: 341175
  chr11:71724337-71725088
  hypo
  sarcoma vs. melanoma,lymphoid_neoplasm,colorectal

SEQ ID NO: 478916 - DNA, 731 bp, Homo sapiens; identical to SEQ ID NO: 341176
  chr11:71725587-71726318
  hypo
  sarcoma vs. melanoma

SEQ ID NO: 478917 - DNA, 31 bp, Homo sapiens; identical to SEQ ID NO: 456406
  chr11:75852075-75852106
  hypo
  sarcoma vs. liver_bileduct

SEQ ID NO: 478918 - DNA, 510 bp, Homo sapiens; identical to SEQ ID NO: 452797
  chr11:76381512-76382022
  hypo
  sarcoma vs. multiple_myeloma,lymphoid_neoplasm, non_cancer,thyroid,myeloid_neoplasm,bladder_and_urothelial, prostate,breast

SEQ ID NO: 478919 - DNA, 30 bp, Homo sapiens; identical to SEQ ID NO: 452798
  chr11:76382264-76382294
  hypo
  sarcoma vs. multiple_myeloma,lymphoid_neoplasm, non_cancer,thyroid,myeloid_neoplasm,bladder_and_urothelial, prostate,breast

SEQ ID NO: 478920 - DNA, 118 bp, Homo sapiens; identical to SEQ ID NO: 341203
  chr11:77383112-77383230
  hypo
  sarcoma vs. lung

SEQ ID NO: 478921 - DNA, 320 bp, Homo sapiens; identical to SEQ ID NO: 341237
  chr11:117073762-117074082
  hypo
  sarcoma vs. melanoma,head_and_neck,lymphoid_neoplasm, lung,breast,renal,upper_gi

SEQ ID NO: 478922 - DNA, 126 bp, Homo sapiens; identical to SEQ ID NO: 365812
  chr11:117075032-117075158
  hypo
  sarcoma vs. melanoma

SEQ ID NO: 478923 - DNA, 206 bp, Homo sapiens; identical to SEQ ID NO: 341239
  chr11:117076092-117076298
  hypo
  sarcoma vs. upper_gi,bladder_and_urothelial

SEQ ID NO: 478924 - DNA, 197 bp, Homo sapiens; identical to SEQ ID NO: 341393
  chr12:47497161-47497358
  hypo
  sarcoma vs. head_and_neck

SEQ ID NO: 478925 - DNA, 172 bp, Homo sapiens; identical to SEQ ID NO: 341421
  chr12:53474309-53474481
  hypo
  sarcoma vs. melanoma,anorectal,cervical, pancreas_gallbladder,lymphoid_neoplasm,uterine,thyroid, liver_bileduct,prostate

SEQ ID NO: 478926 - DNA, 432 bp, Homo sapiens; identical to SEQ ID NO: 334559
  chr12:54400009-54400441
  hypo
  sarcoma vs. ovary,bladder_and_urothelial,prostate

SEQ ID NO: 478927 - DNA, 146 bp, Homo sapiens; identical to SEQ ID NO: 365986
  chr12:58262601-58262747
  hypo
  sarcoma vs. melanoma

SEQ ID NO: 478928 - DNA, 171 bp, Homo sapiens; identical to SEQ ID NO: 341443
  chr12:58263143-58263314
  hypo
  sarcoma vs. melanoma,bladder_and_urothelial, lymphoid_neoplasm,breast,prostate,head_and_neck,upper_gi,renal, lung,uterine,cervical,ovary

SEQ ID NO: 478929 - DNA, 74 bp, Homo sapiens; identical to SEQ ID NO: 468724
  chr12:96184964-96185038
  hypo
  sarcoma vs. cervical,uterine

SEQ ID NO: 478930 - DNA, 222 bp, Homo sapiens; identical to SEQ ID NO: 360178
  chr12:96185121-96185343
  hypo
  sarcoma vs. cervical,uterine

SEQ ID NO: 478931 - DNA, 113 bp, Homo sapiens; identical to SEQ ID NO: 366025
  chr12:110258862-110258975
  hypo
  sarcoma vs. melanoma

SEQ ID NO: 478932 - DNA, 94 bp, Homo sapiens; identical to SEQ ID NO: 380166
  chr12:114282487-114282581
  hypo
  sarcoma vs. upper_gi

SEQ ID NO: 478933 - DNA, 238 bp, Homo sapiens; identical to SEQ ID NO: 477303
  chr12:117155351-117155589
  hypo
  sarcoma vs. liver_bileduct,anorectal

SEQ ID NO: 478934 - DNA, 187 bp, Homo sapiens; identical to SEQ ID NO: 354948
  chr12:117155627-117155814
  hypo
  sarcoma vs. liver_bileduct,anorectal

SEQ ID NO: 478935 - DNA, 124 bp, Homo sapiens; identical to SEQ ID NO: 341564
  chr12:122179060-122179184
  hypo
  sarcoma vs. liver_bileduct

SEQ ID NO: 478936 - DNA, 94 bp, Homo sapiens; identical to SEQ ID NO: 341566
  chr12:122206347-122206441
  hypo
  sarcoma vs. head_and_neck,melanoma,myeloid_neoplasm

SEQ ID NO: 478937 - DNA, 185 bp, Homo sapiens; identical to SEQ ID NO: 334680
  chr12:122214111-122214296
  hypo
  sarcoma vs. lymphoid_neoplasm

SEQ ID NO: 478938 - DNA, 551 bp, Homo sapiens; identical to SEQ ID NO: 334686
  chr12:123258823-123259374
  hypo
  sarcoma vs. breast,bladder_and_urothelial,lung, head_and_neck,colorectal,multiple_myeloma,pancreas_gallbladder, anorectal,upper_gi,uterine,prostate

SEQ ID NO: 478939 - DNA, 200 bp, Homo sapiens; identical to SEQ ID NO: 341648
  chr12:132250682-132250882
  hypo
  sarcoma vs. liver_bileduct,lung,upper_gi, bladder_and_urothelial,pancreas_gallbladder,ovary,cervical, anorectal,colorectal

SEQ ID NO: 478940 - DNA, 168 bp, Homo sapiens; identical to SEQ ID NO: 462415
  chr13:20735265-20735433
  hypo
  sarcoma vs. uterine,head_and_neck,ovary,cervical

SEQ ID NO: 478941 - DNA, 178 bp, Homo sapiens; identical to SEQ ID NO: 468743
  chr13:33000891-33001069
  hypo
  sarcoma vs. anorectal

SEQ ID NO: 478942 - DNA, 204 bp, Homo sapiens; identical to SEQ ID NO: 351462
  chr13:33001228-33001432
  hypo
  sarcoma vs. anorectal

SEQ ID NO: 478943 - DNA, 9 bp, Homo sapiens
  chr13:99104169-99104178
  hypo
  sarcoma vs. lymphoid_neoplasm,melanoma,head_and_neck, pancreas_gallbladder,upper_gi,ovary,cervical,breast,colorectal, uterine
cggcaaccg

SEQ ID NO: 478944 - DNA, 355 bp, Homo sapiens; identical to SEQ ID NO: 355065
  chr13:99104223-99104578
  hypo
  sarcoma vs. lymphoid_neoplasm,melanoma,head_and_neck, pancreas_gallbladder,upper_gi,ovary,cervical,breast,colorectal, uterine

SEQ ID NO: 478945 - DNA, 535 bp, Homo sapiens; identical to SEQ ID NO: 341819
  chr13:113497181-113497716
  hypo
  sarcoma vs. melanoma,lymphoid_neoplasm,liver_bileduct

SEQ ID NO: 478946 - DNA, 137 bp, Homo sapiens; identical to SEQ ID NO: 341873
  chr13:114799639-114799776
  hypo
  sarcoma vs. melanoma

SEQ ID NO: 478947 - DNA, 108 bp, Homo sapiens; identical to SEQ ID NO: 360374
  chr14:24550913-24551021
  hypo
  sarcoma vs. ovary,pancreas_gallbladder,lung

SEQ ID NO: 478948 - DNA, 166 bp, Homo sapiens; identical to SEQ ID NO: 341915
  chr14:55982010-55982176
  hypo
  sarcoma vs. liver_bileduct

SEQ ID NO: 478949 - DNA, 214 bp, Homo sapiens; identical to SEQ ID NO: 334917
  chr14:58862962-58863176
  hypo
  sarcoma vs. liver_bileduct,cervical

SEQ ID NO: 478950 - DNA, 355 bp, Homo sapiens; identical to SEQ ID NO: 468763
  chr14:61123186-61123541
  hypo
  sarcoma vs. cervical,uterine,prostate,breast

SEQ ID NO: 478951 - DNA, 460 bp, Homo sapiens; identical to SEQ ID NO: 468764
  chr14:61123681-61124141
  hypo
  sarcoma vs. cervical,uterine,prostate,breast

SEQ ID NO: 478952 - DNA, 95 bp, Homo sapiens; identical to SEQ ID NO: 341972
  chr14:76446078-76446173
  hypo
  sarcoma vs. melanoma

SEQ ID NO: 478953 - DNA, 166 bp, Homo sapiens; identical to SEQ ID NO: 465117
  chr14:89895069-89895235
  hypo
  sarcoma vs. melanoma,anorectal,liver_bileduct

SEQ ID NO: 478954 - DNA, 870 bp, Homo sapiens
  chr14:91805132-91806002
  hypo
  sarcoma vs. head_and_neck
cgccactcaggtctccctccctgtgtgtggggcaggtaaggagaccccagcggcagctgtaccaccccacagccaggctccacaggtgacatccatcagctgcaggaaacctgggagaacaggctcaccagattggagggaaggaggggcacctcatccctccagccaagaaaacacatcaggtgtggtcgtcccggccccaagctggagctgagcgtggactggaggctgcttctgtggacaacttgcaccgtctggacgggaggaaaccctgaagaccgggaagaatccccgcccccatccctgtgcaggcctcagaaggggaggcagctagtccgaggtcaaagagtaagctcagggcagaccccagctgactccggggcacacgtcagagctgtgccattggcagcaccacacatgtgagtcgacaccacaccagaaacatgtctgcaacacacacaaaggtaggagaagcagccggggactcacagctcctgcctgacgcgccgcagcctggccttggtgtcggccagctctacggccaggtgctgcttgtcttcgctagagaggctgctggtggggctgggagtggagtcggcgctggaggacttgatggggctgggtggatgctgtgcctgcaggtagtcccgttcctgagtgaggtccacgatcagctgcagccgggcagagagggggatggaggagaacaaacggggttaaccagcacaacgcctgagcttgaacagggtgaagaaaccgccaaaagacagatatttcagcggagactaagaaacgaggaggaaggtgggaaaaggctggcatgggttttgaaaagaggtgaaatatttagtgaaacaaaagggagtgtac

SEQ ID NO: 478955 - DNA, 203 bp, Homo sapiens; identical to SEQ ID NO: 355161
  chr14:91808058-91808261
  hypo
  sarcoma vs. upper_gi,breast,lymphoid_neoplasm, pancreas_gallbladder,head_and_neck,anorectal,uterine,colorectal, cervical,renal,prostate

SEQ ID NO: 478956 - DNA, 182 bp, Homo sapiens; identical to SEQ ID NO: 345461
  chr14:94406037-94406219
  hypo
  sarcoma vs. renal,multiple_myeloma,prostate,breast, non_cancer,myeloid_neoplasm,thyroid,uterine,ovary, pancreas_gallbladder

SEQ ID NO: 478957 - DNA, 800 bp, Homo sapiens; identical to SEQ ID NO: 342049
  chr14:102516079-102516879
  hypo
  sarcoma vs. melanoma

SEQ ID NO: 478958 - DNA, 147 bp, Homo sapiens; identical to SEQ ID NO: 366491
  chr14:103986352-103986499
  hypo
  sarcoma vs. head_and_neck

SEQ ID NO: 478959 - DNA, 138 bp, Homo sapiens; identical to SEQ ID NO: 355194
  chr14:104000003-104000141
  hypo
  sarcoma vs. bladder_and_urothelial,head_and_neck, melanoma,cervical,multiple_myeloma,anorectal,liver_bileduct, lymphoid_neoplasm,breast,lung,prostate,renal,upper_gi, non_cancer

SEQ ID NO: 478960 - DNA, 734 bp, Homo sapiens; identical to SEQ ID NO: 355195
  chr14:104000403-104001137
  hypo
  sarcoma vs. head_and_neck,lymphoid_neoplasm,lung, liver_bileduct,renal,breast,cervical,uterine,prostate,anorectal, bladder_and_urothelial,colorectal,upper_gi,thyroid

SEQ ID NO: 478961 - DNA, 198 bp, Homo sapiens; identical to SEQ ID NO: 345462
  chr14:105189960-105190158
  hypo
  sarcoma vs. melanoma,breast,pancreas_gallbladder,lung, head_and_neck,bladder_and_urothelial,cervical,colorectal, prostate,upper_gi,multiple_myeloma,anorectal,uterine,ovary, non_cancer,lymphoid_neoplasm,renal,myeloid_neoplasm,thyroid,
  CONT. FROM ABOVE: liver_bileduct

SEQ ID NO: 478962 - DNA, 455 bp, Homo sapiens; identical to SEQ ID NO: 351636
  chr14:105330980-105331435
  hypo
  sarcoma vs. ovary,lung,head_and_neck,anorectal, pancreas_gallbladder,breast,liver_bileduct,colorectal

SEQ ID NO: 478963 - DNA, 111 bp, Homo sapiens; identical to SEQ ID NO: 335080
  chr15:38857279-38857390
  hypo
  sarcoma vs. lymphoid_neoplasm,bladder_and_urothelial, lung,anorectal,multiple_myeloma,uterine

SEQ ID NO: 478964 - DNA, 162 bp, Homo sapiens; identical to SEQ ID NO: 462468
  chr15:40575352-40575514
  hypo
  sarcoma vs. cervical,anorectal

SEQ ID NO: 478965 - DNA, 417 bp, Homo sapiens; identical to SEQ ID NO: 468786
  chr15:41136701-41137118
  hypo
  sarcoma vs. lung

SEQ ID NO: 478966 - DNA, 44 bp, Homo sapiens; identical to SEQ ID NO: 203840
  chr15:41137147-41137191
  hypo
  sarcoma vs. lung

SEQ ID NO: 478967 - DNA, 379 bp, Homo sapiens; identical to SEQ ID NO: 360648
  chr15:57598802-57599181
  hypo
  sarcoma vs. liver_bileduct,melanoma

SEQ ID NO: 478968 - DNA, 782 bp, Homo sapiens; identical to SEQ ID NO: 351688
  chr15:60884567-60885349
  hypo
  sarcoma vs. ovary,cervical,head_and_neck, pancreas_gallbladder,uterine,renal

SEQ ID NO: 478969 - DNA, 218 bp, Homo sapiens; identical to SEQ ID NO: 342214
  chr15:63889834-63890052
  hypo
  sarcoma vs. melanoma,liver_bileduct,renal,breast, head_and_neck,ovary,pancreas_gallbladder,prostate, multiple_myeloma,anorectal,cervical,lung

SEQ ID NO: 478970 - DNA, 242 bp, Homo sapiens; identical to SEQ ID NO: 380861
  chr15:70354323-70354565
  hypo
  sarcoma vs. lymphoid_neoplasm,head_and_neck

SEQ ID NO: 478971 - DNA, 191 bp, Homo sapiens; identical to SEQ ID NO: 335181
  chr15:75976190-75976381
  hypo
  sarcoma vs. lymphoid_neoplasm,lung,upper_gi, bladder_and_urothelial,renal,pancreas_gallbladder,uterine, multiple_myeloma,ovary,liver_bileduct,anorectal,colorectal, breast,cervical

SEQ ID NO: 478972 - DNA, 60 bp, Homo sapiens; identical to SEQ ID NO: 454806
  chr15:79208280-79208340
  hypo
  sarcoma vs. lymphoid_neoplasm

SEQ ID NO: 478973 - DNA, 195 bp, Homo sapiens; identical to SEQ ID NO: 462486
  chr15:82339684-82339879
  hypo
  sarcoma vs. ovary

SEQ ID NO: 478974 - DNA, 387 bp, Homo sapiens; identical to SEQ ID NO: 342283
  chr15:91503650-91504037
  hypo
  sarcoma vs. melanoma,head_and_neck, bladder_and_urothelial,lung

SEQ ID NO: 478975 - DNA, 226 bp, Homo sapiens; identical to SEQ ID NO: 355304
  chr15:99497132-99497358
  hypo
  sarcoma vs. lung,lymphoid_neoplasm,head_and_neck,uterine, bladder_and_urothelial,upper_gi,breast,pancreas_gallbladder, colorectal,prostate

SEQ ID NO: 478976 - DNA, 142 bp, Homo sapiens; identical to SEQ ID NO: 380982
  chr16:834381-834523
  hypo
  sarcoma vs. anorectal

SEQ ID NO: 478977 - DNA, 543 bp, Homo sapiens; identical to SEQ ID NO: 345486
  chr16:4233245-4233788
  hypo
  sarcoma vs. ovary,upper_gi,melanoma,breast, pancreas_gallbladder,lung,head_and_neck,renal,uterine, colorectal,cervical,anorectal,bladder_and_urothelial,prostate, non_cancer,liver_bileduct,lymphoid_neoplasm,myeloid_neoplasm,
  CONT. FROM ABOVE: thyroid

SEQ ID NO: 478978 - DNA, 77 bp, Homo sapiens; identical to SEQ ID NO: 342462
  chr16:4438405-4438482
  hypo
  sarcoma vs. melanoma

SEQ ID NO: 478979 - DNA, 130 bp, Homo sapiens
  chr16:11178526-11178656
  hypo
  sarcoma vs. head_and_neck,upper_gi
cgccggctatatgagtcatctccactgtggagggaggcaattttaaactggaaaggtcaatcgacatgtcagaatatctagtaaatcattcgcgttccacctggtgccccttccattcccctgaaaaagc

SEQ ID NO: 478980 - DNA, 620 bp, Homo sapiens; identical to SEQ ID NO: 366856
  chr16:11178685-11179305
  hypo
  sarcoma vs. head_and_neck,upper_gi

SEQ ID NO: 478981 - DNA, 430 bp, Homo sapiens; identical to SEQ ID NO: 452918
  chr16:12897365-12897795
  hypo
  sarcoma vs. ovary,melanoma,prostate,lung

SEQ ID NO: 478982 - DNA, 211 bp, Homo sapiens; identical to SEQ ID NO: 342537
  chr16:27791003-27791214
  hypo
  sarcoma vs. lymphoid_neoplasm,head_and_neck, liver_bileduct

SEQ ID NO: 478983 - DNA, 43 bp, Homo sapiens; identical to SEQ ID NO: 216882
  chr16:28887802-28887845
  hypo
  sarcoma vs. breast,liver_bileduct,thyroid,prostate, lymphoid_neoplasm,colorectal,bladder_and_urothelial,upper_gi

SEQ ID NO: 478984 - DNA, 276 bp, Homo sapiens; identical to SEQ ID NO: 355443
  chr16:29170096-29170372
  hypo
  sarcoma vs. melanoma

SEQ ID NO: 478985 - DNA, 397 bp, Homo sapiens; identical to SEQ ID NO: 351796
  chr16:31712178-31712575
  hypo
  sarcoma vs. liver_bileduct,pancreas_gallbladder, lymphoid_neoplasm

SEQ ID NO: 478986 - DNA, 507 bp, Homo sapiens; identical to SEQ ID NO: 342569
  chr16:46683305-46683812
  hypo
  sarcoma vs. anorectal,lymphoid_neoplasm,prostate

SEQ ID NO: 478987 - DNA, 256 bp, Homo sapiens; identical to SEQ ID NO: 455742
  chr16:67678786-67679042
  hypo
  sarcoma vs. lymphoid_neoplasm

SEQ ID NO: 478988 - DNA, 299 bp, Homo sapiens
  chr16:88096563-88096862
  hypo
  sarcoma vs. head_and_neck,bladder_and_urothelial, lymphoid_neoplasm
cgtgacctcatttttgctgcttcacgtttaagatctgactgctgagttgtcctcatcaccaatttcaaatcaagcccaaatccacaaactatatctcagcctcctgtgtgttttaagaggctgcgccgtgcatggaggtgccctcagcctgcagcagcgcagccaagcggagggcgcaccgcggccttctgtgtgactgttctcagagcacgctgtgccttcatttctgcgtgtttcacggcgttgcccttgtggtatctgctgaccccggttcccttatttctaggcccagtgcctcg

SEQ ID NO: 478989 - DNA, 328 bp, Homo sapiens; identical to SEQ ID NO: 360927
  chr17:1954658-1954986
  hypo
  sarcoma vs. bladder_and_urothelial

SEQ ID NO: 478990 - DNA, 123 bp, Homo sapiens; identical to SEQ ID NO: 342847
  chr17:4137086-4137209
  hypo
  sarcoma vs. liver_bileduct,lymphoid_neoplasm

SEQ ID NO: 478991 - DNA, 675 bp, Homo sapiens; identical to SEQ ID NO: 472536
  chr17:16283956-16284631
  hypo
  sarcoma vs. liver_bileduct

SEQ ID NO: 478992 - DNA, 389 bp, Homo sapiens; identical to SEQ ID NO: 472537
  chr17:16284242-16284631
  hypo
  sarcoma vs. lymphoid_neoplasm,liver_bileduct,lung,renal, prostate,breast,cervical,upper_gi

SEQ ID NO: 478993 - DNA, 39 bp, Homo sapiens; identical to SEQ ID NO: 347411
  chr17:16285065-16285104
  hypo
  sarcoma vs. lymphoid_neoplasm,liver_bileduct,lung,renal, prostate,breast,cervical,upper_gi

SEQ ID NO: 478994 - DNA, 280 bp, Homo sapiens; identical to SEQ ID NO: 466613
  chr17:39683530-39683810
  hypo
  sarcoma vs. pancreas_gallbladder,lung,cervical,anorectal, breast,ovary,colorectal,upper_gi

SEQ ID NO: 478995 - DNA, 487 bp, Homo sapiens; identical to SEQ ID NO: 466614
  chr17:39683839-39684326
  hypo
  sarcoma vs. pancreas_gallbladder,lung,cervical,anorectal, breast,ovary,colorectal,upper_gi

SEQ ID NO: 478996 - DNA, 80 bp, Homo sapiens; identical to SEQ ID NO: 343039
  chr17:56439864-56439944
  hypo
  sarcoma vs. cervical,uterine,bladder_and_urothelial, lymphoid_neoplasm,breast

SEQ ID NO: 478997 - DNA, 41 bp, Homo sapiens; identical to SEQ ID NO: 468883
  chr17:60885408-60885449
  hypo
  sarcoma vs. uterine,ovary,bladder_and_urothelial, pancreas_gallbladder,colorectal,thyroid,cervical,upper_gi, myeloid_neoplasm,lung,non_cancer,renal,head_and_neck,anorectal, breast,multiple_myeloma

SEQ ID NO: 478998 - DNA, 308 bp, Homo sapiens; identical to SEQ ID NO: 347460
  chr17:60885548-60885856
  hypo
  sarcoma vs. uterine,ovary,bladder_and_urothelial, pancreas_gallbladder,colorectal,thyroid,cervical,upper_gi, myeloid_neoplasm,lung,non_cancer,renal,head_and_neck,anorectal, breast,multiple_myeloma

SEQ ID NO: 478999 - DNA, 29 bp, Homo sapiens
  chr17:66434420-66434449
  hypo
  sarcoma vs. myeloid_neoplasm,prostate,colorectal, non_cancer,multiple_myeloma,pancreas_gallbladder,renal,upper_gi
cctggccccagccttagaagaggccactc

SEQ ID NO: 479000 - DNA, 125 bp, Homo sapiens; identical to SEQ ID NO: 468888
  chr17:77778310-77778435
  hypo
  sarcoma vs. head_and_neck,bladder_and_urothelial, lymphoid_neoplasm,cervical,uterine,multiple_myeloma,anorectal, lung,prostate,breast,renal

SEQ ID NO: 479001 - DNA, 42 bp, Homo sapiens; identical to SEQ ID NO: 464314
  chr17:77788305-77788347
  hypo
  sarcoma vs. anorectal,breast

SEQ ID NO: 479002 - DNA, 234 bp, Homo sapiens; identical to SEQ ID NO: 464315
  chr17:77788400-77788634
  hypo
  sarcoma vs. anorectal,breast

SEQ ID NO: 479003 - DNA, 446 bp, Homo sapiens; identical to SEQ ID NO: 355752
  chr17:78935167-78935613
  hypo
  sarcoma vs. melanoma,lymphoid_neoplasm,head_and_neck, bladder_and_urothelial,breast,upper_gi,anorectal,liver_bileduct, colorectal

SEQ ID NO: 479004 - DNA, 735 bp, Homo sapiens; identical to SEQ ID NO: 352037
  chr17:79007528-79008263
  hypo
  sarcoma vs. ovary,breast,renal,bladder_and_urothelial, liver_bileduct,upper_gi,cervical,prostate,pancreas_gallbladder, uterine,multiple_myeloma,colorectal

SEQ ID NO: 479005 - DNA, 685 bp, Homo sapiens; identical to SEQ ID NO: 478218
  chr17:79007862-79008547
  hypo
  sarcoma vs. breast,renal,bladder_and_urothelial,ovary, liver_bileduct,upper_gi,cervical

SEQ ID NO: 479006 - DNA, 221 bp, Homo sapiens; identical to SEQ ID NO: 455803
  chr17:80186335-80186556
  hypo
  sarcoma vs. bladder_and_urothelial,colorectal, multiple_myeloma,upper_gi,anorectal,head_and_neck

SEQ ID NO: 479007 - DNA, 517 bp, Homo sapiens; identical to SEQ ID NO: 347473
  chr17:80186618-80187135
  hypo
  sarcoma vs. bladder_and_urothelial,colorectal, multiple_myeloma,upper_gi,anorectal,head_and_neck

SEQ ID NO: 479008 - DNA, 3 bp, Homo sapiens
  chr18:9913003-9913006
  hypo
  sarcoma vs. renal
atc

SEQ ID NO: 479009 - DNA, 47 bp, Homo sapiens
  chr18:12277197-12277244
  hypo
  sarcoma vs. melanoma,lung,uterine,anorectal, lymphoid_neoplasm,breast,renal
cgggtgctggatgacaaggaagagcggccatccctccggtcacaagc

SEQ ID NO: 479010 - DNA, 111 bp, Homo sapiens; identical to SEQ ID NO: 348878
  chr18:12277273-12277384
  hypo
  sarcoma vs. melanoma,lung,uterine,anorectal, lymphoid_neoplasm,breast,renal

SEQ ID NO: 479011 - DNA, 9 bp, Homo sapiens
  chr18:24128185-24128194
  hypo
  sarcoma vs. ovary,thyroid
caggggctc

SEQ ID NO: 479012 - DNA, 142 bp, Homo sapiens; identical to SEQ ID NO: 335782
  chr18:29598295-29598437
  hypo
  sarcoma vs. ovary,bladder_and_urothelial,lung, head_and_neck,colorectal,pancreas_gallbladder

SEQ ID NO: 479013 - DNA, 556 bp, Homo sapiens; identical to SEQ ID NO: 335811
  chr18:46502500-46503056
  hypo
  sarcoma vs. lung,breast,colorectal,head_and_neck, prostate,pancreas_gallbladder,uterine,upper_gi,ovary,renal, liver_bileduct,bladder_and_urothelial,thyroid,cervical

SEQ ID NO: 479014 - DNA, 460 bp, Homo sapiens; identical to SEQ ID NO: 343430
  chr18:74159178-74159638
  hypo
  sarcoma vs. liver_bileduct,lymphoid_neoplasm,renal

SEQ ID NO: 479015 - DNA, 367 bp, Homo sapiens; identical to SEQ ID NO: 470305
  chr18:74171117-74171484
  hypo
  sarcoma vs. melanoma

SEQ ID NO: 479016 - DNA, 122 bp, Homo sapiens; identical to SEQ ID NO: 355868
  chr18:74171505-74171627
  hypo
  sarcoma vs. melanoma

SEQ ID NO: 479017 - DNA, 641 bp, Homo sapiens; identical to SEQ ID NO: 382095
  chr18:74323522-74324163
  hypo
  sarcoma vs. lymphoid_neoplasm,renal

SEQ ID NO: 479018 - DNA, 428 bp, Homo sapiens; identical to SEQ ID NO: 343453
  chr18:74770092-74770520
  hypo
  sarcoma vs. melanoma

SEQ ID NO: 479019 - DNA, 817 bp, Homo sapiens; identical to SEQ ID NO: 347518
  chr18:74844285-74845102
  hypo
  sarcoma vs. pancreas_gallbladder,head_and_neck,lung, cervical,upper_gi,anorectal,liver_bileduct,colorectal,breast, prostate,renal,ovary,uterine,thyroid,non_cancer, myeloid_neoplasm

SEQ ID NO: 479020 - DNA, 584 bp, Homo sapiens; identical to SEQ ID NO: 462594
  chr18:77160022-77160606
  hypo
  sarcoma vs. myeloid_neoplasm,non_cancer,thyroid, multiple_myeloma

SEQ ID NO: 479021 - DNA, 411 bp, Homo sapiens; identical to SEQ ID NO: 343493
  chr18:77497998-77498409
  hypo
  sarcoma vs. liver_bileduct

SEQ ID NO: 479022 - DNA, 268 bp, Homo sapiens; identical to SEQ ID NO: 343558
  chr19:1223581-1223849
  hypo
  sarcoma vs. liver_bileduct

SEQ ID NO: 479023 - DNA, 205 bp, Homo sapiens; identical to SEQ ID NO: 343624
  chr19:3669713-3669918
  hypo
  sarcoma vs. liver_bileduct,renal,pancreas_gallbladder, bladder_and_urothelial,lymphoid_neoplasm,cervical,colorectal, breast,prostate,lung,myeloid_neoplasm,head_and_neck,uterine, non_cancer

SEQ ID NO: 479024 - DNA, 61 bp, Homo sapiens; identical to SEQ ID NO: 465356
  chr19:3747832-3747893
  hypo
  sarcoma vs. liver_bileduct

SEQ ID NO: 479025 - DNA, 98 bp, Homo sapiens; identical to SEQ ID NO: 367809
  chr19:3748020-3748118
  hypo
  sarcoma vs. liver_bileduct

SEQ ID NO: 479026 - DNA, 109 bp, Homo sapiens
  chr19:4679454-4679563
  hypo
  sarcoma vs. melanoma
cgccttaggaaggagcctgctagggccttcagcactcagcggtttcttctacgcaatttctcagtttcaaataaagcccgtctgcggggcaatttcggtaagggttcct

SEQ ID NO: 479027 - DNA, 16 bp, Homo sapiens
  chr19:4679619-4679635
  hypo
  sarcoma vs. melanoma
agcaccgaaggcaggc

SEQ ID NO: 479028 - DNA, 352 bp, Homo sapiens; identical to SEQ ID NO: 343699
  chr19:6744359-6744711
  hypo
  sarcoma vs. anorectal

SEQ ID NO: 479029 - DNA, 155 bp, Homo sapiens; identical to SEQ ID NO: 382398
  chr19:7543311-7543466
  hypo
  sarcoma vs. melanoma

SEQ ID NO: 479030 - DNA, 117 bp, Homo sapiens; identical to SEQ ID NO: 343709
  chr19:7992986-7993103
  hypo
  sarcoma vs. upper_gi,lymphoid_neoplasm, bladder_and_urothelial

SEQ ID NO: 479031 - DNA, 122 bp, Homo sapiens; identical to SEQ ID NO: 382405
  chr19:7997652-7997774
  hypo
  sarcoma vs. melanoma

SEQ ID NO: 479032 - DNA, 992 bp, Homo sapiens; identical to SEQ ID NO: 335937
  chr19:10381056-10382048
  hypo
  sarcoma vs. lymphoid_neoplasm,melanoma, pancreas_gallbladder,cervical,breast,multiple_myeloma

SEQ ID NO: 479033 - DNA, 39 bp, Homo sapiens; identical to SEQ ID NO: 452979
  chr19:10616220-10616259
  hypo
  sarcoma vs. bladder_and_urothelial

SEQ ID NO: 479034 - DNA, 444 bp, Homo sapiens; identical to SEQ ID NO: 367923
  chr19:11004773-11005217
  hypo
  sarcoma vs. liver_bileduct

SEQ ID NO: 479035 - DNA, 98 bp, Homo sapiens; identical to SEQ ID NO: 343756
  chr19:11172428-11172526
  hypo
  sarcoma vs. liver_bileduct

SEQ ID NO: 479036 - DNA, 801 bp, Homo sapiens
  chr19:11303560-11304361
  hypo
  sarcoma vs. head_and_neck,breast,lymphoid_neoplasm, bladder_and_urothelial,renal,cervical,prostate,upper_gi
cgttgctggtagctgcagcgggcactgggcacattgtctccaccacctcctggctgcggaacacaggtgggctctcaggcctaccaggcattgccagggccctcagccctgtgccgtaaggctccaggctctgggcccgctgtgcgggggcgccagcggctgtgctggccaccacctccacctcccgtggcccttctaccacccggactgtatccacgcggaccgggctgtccggcggtggccaggcctggggctgggggtcagcctgccgggcctgagctgcctgcagctcctgcagcgccttcttgagctgggtctccagcacagcgaccttggcggcgagggcagcctccccatcaggcatgcccaagtcccgttctcgaacccaggtgcccacactccgggtctccagtgccactgggtcctctgggggatcggggaggtccaggcagagctcgctgcgaccccggcccgctgtggggtggcccaggaacttctggctcttaagttgtactgtgagctgccgcttttcctcctggagcaccgagagcttcacctggagcacagggatcagcttcacctgctcctccagctgccgcagcttccgcagggcacccgccatctgctcccgcacgtgggccaggtgcccggcactgggaggcaccggtgtggacagtcctgaactccgtggtgtcgggggtggcaaccccacgcccaccagggaggctgtcgagccggccgcactgggggtcagggagcccaggccggtgggtgtggccgcctggtcctcgagacggcgac

SEQ ID NO: 479037 - DNA, 784 bp, Homo sapiens
  chr19:11303887-11304671
  hypo
  sarcoma vs. melanoma,breast,bladder_and_urothelial, head_and_neck,renal
cgaccttggcggcgagggcagcctccccatcaggcatgcccaagtcccgttctcgaacccaggtgcccacactccgggtctccagtgccactgggtcctctgggggatcggggaggtccaggcagagctcgctgcgaccccggcccgctgtggggtggcccaggaacttctggctcttaagttgtactgtgagctgccgcttttcctcctggagcaccgagagcttcacctggagcacagggatcagcttcacctgctcctccagctgccgcagcttccgcagggcacccgccatctgctcccgcacgtgggccaggtgcccggcactgggaggcaccggtgtggacagtcctgaactccgtggtgtcgggggtggcaaccccacgcccaccagggaggctgtcgagccggccgcactgggggtcagggagcccaggccggtgggtgtggccgcctggtcctcgagacggcgacgggcatccagcagcgtgcgctccacccgcggattgaagccaccgcgggtctccagagcaccatactgagggtagaagccacggccgcagtaggaataggctgagtggcggctgtccccactggcattggagcacagcgactcagtggacgtccaccaggagccagggccacggggcagcgagctcaggcgggggcggcgctgcactgccacgcgtcgcagcgtgtggcccttctcgatgtcatccacgtacttgaggaagtccaggtccaggcggtagccatagggggtctccacggagtagggtggatc

SEQ ID NO: 479038 - DNA, 433 bp, Homo sapiens; identical to SEQ ID NO: 356037
  chr19:11662248-11662681
  hypo
  sarcoma vs. liver_bileduct,head_and_neck, lymphoid_neoplasm,lung,pancreas_gallbladder,renal,melanoma, anorectal,cervical

SEQ ID NO: 479039 - DNA, 645 bp, Homo sapiens; identical to SEQ ID NO: 343777
  chr19:13108022-13108667
  hypo
  sarcoma vs. liver_bileduct

SEQ ID NO: 479040 - DNA, 32 bp, Homo sapiens
  chr19:13112089-13112121
  hypo
  sarcoma vs. melanoma,anorectal
cgtgtgtctgcccgggtccctctccatgcctc

SEQ ID NO: 479041 - DNA, 156 bp, Homo sapiens; identical to SEQ ID NO: 219196
  chr19:13112293-13112449
  hypo
  sarcoma vs. melanoma,anorectal

SEQ ID NO: 479042 - DNA, 182 bp, Homo sapiens; identical to SEQ ID NO: 343782
  chr19:13114040-13114222
  hypo
  sarcoma vs. liver_bileduct,melanoma

SEQ ID NO: 479043 - DNA, 857 bp, Homo sapiens; identical to SEQ ID NO: 475538
  chr19:13265772-13266629
  hypo
  sarcoma vs. upper_gi,breast,lymphoid_neoplasm, bladder_and_urothelial,head_and_neck,lung,multiple_myeloma, colorectal,ovary,anorectal,uterine,non_cancer, pancreas_gallbladder,myeloid_neoplasm,renal,thyroid,cervical,
  CONT. FROM ABOVE: liver_bileduct

SEQ ID NO: 479044 - DNA, 872 bp, Homo sapiens; identical to SEQ ID NO: 475539
  chr19:13266157-13267029
  hypo
  sarcoma vs. multiple_myeloma,lymphoid_neoplasm,anorectal, breast,uterine,thyroid,non_cancer,myeloid_neoplasm,lung,ovary, pancreas_gallbladder,renal,upper_gi,colorectal,head_and_neck

SEQ ID NO: 479045 - DNA, 150 bp, Homo sapiens; identical to SEQ ID NO: 367960
  chr19:14073146-14073296
  hypo
  sarcoma vs. melanoma,liver_bileduct

SEQ ID NO: 479046 - DNA, 881 bp, Homo sapiens; identical to SEQ ID NO: 347555
  chr19:14073521-14074402
  hypo
  sarcoma vs. melanoma,liver_bileduct,lymphoid_neoplasm, bladder_and_urothelial,lung,breast,pancreas_gallbladder, prostate,anorectal,cervical,colorectal,upper_gi,uterine

SEQ ID NO: 479047 - DNA, 897 bp, Homo sapiens; identical to SEQ ID NO: 478268
  chr19:14073926-14074823
  hypo
  sarcoma vs. melanoma,liver_bileduct,lymphoid_neoplasm, bladder_and_urothelial,pancreas_gallbladder

SEQ ID NO: 479048 - DNA, 6 bp, Homo sapiens
  chr19:17717524-17717530
  hypo
  sarcoma vs. melanoma
ccgcac

SEQ ID NO: 479049 - DNA, 68 bp, Homo sapiens
  chr19:18783006-18783074
  hypo
  sarcoma vs. uterine,melanoma,colorectal,thyroid,renal, ovary,cervical,lung,lymphoid_neoplasm,liver_bileduct,upper_gi
acttctggggcctctcagcaagtgagggccaagggggcctctggggagccgtgtgaggtgggaatccg

SEQ ID NO: 479050 - DNA, 35 bp, Homo sapiens
  chr19:18783151-18783186
  hypo
  sarcoma vs. uterine,melanoma,colorectal,thyroid,renal, ovary,cervical,lung,lymphoid_neoplasm,liver_bileduct,upper_gi
ggccctggagattcactttgcacggtgcagcctcg

SEQ ID NO: 479051 - DNA, 126 bp, Homo sapiens; identical to SEQ ID NO: 356078
  chr19:18783216-18783342
  hypo
  sarcoma vs. uterine,melanoma,colorectal,thyroid,renal, ovary,cervical,lung,lymphoid_neoplasm,liver_bileduct,upper_gi

SEQ ID NO: 479052 - DNA, 301 bp, Homo sapiens; identical to SEQ ID NO: 343853
  chr19:18836823-18837124
  hypo
  sarcoma vs. liver_bileduct

SEQ ID NO: 479053 - DNA, 298 bp, Homo sapiens; identical to SEQ ID NO: 462628
  chr19:19738875-19739173
  hypo
  sarcoma vs. head_and_neck,lung,uterine,breast

SEQ ID NO: 479054 - DNA, 247 bp, Homo sapiens; identical to SEQ ID NO: 205295
  chr19:19739428-19739675
  hypo
  sarcoma vs. head_and_neck,lung,uterine,breast

SEQ ID NO: 479055 - DNA, 75 bp, Homo sapiens
  chr19:35589864-35589939
  hypo
  sarcoma vs. melanoma
cgccctgcgctgcgcgttgcctgcccgcgtggcgagccagcctgggatgcagttacgtgctccttccctttcacc

SEQ ID NO: 479056 - DNA, 390 bp, Homo sapiens; identical to SEQ ID NO: 462642
  chr19:38754883-38755273
  hypo
  sarcoma vs. head_and_neck,upper_gi,breast,lung

SEQ ID NO: 479057 - DNA, 175 bp, Homo sapiens; identical to SEQ ID NO: 347598
  chr19:38755344-38755519
  hypo
  sarcoma vs. head_and_neck,upper_gi,breast,lung

SEQ ID NO: 479058 - DNA, 181 bp, Homo sapiens; identical to SEQ ID NO: 478312
  chr19:50353790-50353971
  hypo
  sarcoma vs. upper_gi

SEQ ID NO: 479059 - DNA, 330 bp, Homo sapiens; identical to SEQ ID NO: 336223
  chr19:50828897-50829227
  hypo
  sarcoma vs. melanoma,liver_bileduct,pancreas_gallbladder, lung,ovary

SEQ ID NO: 479060 - DNA, 206 bp, Homo sapiens; identical to SEQ ID NO: 337580
  chr2:27303557-27303763
  hypo
  sarcoma vs. lung,head_and_neck

SEQ ID NO: 479061 - DNA, 92 bp, Homo sapiens; identical to SEQ ID NO: 337630
  chr2:64538788-64538880
  hypo
  sarcoma vs. liver_bileduct

SEQ ID NO: 479062 - DNA, 228 bp, Homo sapiens; identical to SEQ ID NO: 331345
  chr2:74211299-74211527
  hypo
  sarcoma vs. anorectal,head_and_neck,lung,renal,ovary

SEQ ID NO: 479063 - DNA, 163 bp, Homo sapiens; identical to SEQ ID NO: 337692
  chr2:99097200-99097363
  hypo
  sarcoma vs. liver_bileduct

SEQ ID NO: 479064 - DNA, 38 bp, Homo sapiens; identical to SEQ ID NO: 468987
  chr2:166650106-166650144
  hypo
  sarcoma vs. lung,breast,cervical,prostate,head_and_neck, anorectal

SEQ ID NO: 479065 - DNA, 313 bp, Homo sapiens; identical to SEQ ID NO: 468988
  chr2:166650508-166650821
  hypo
  sarcoma vs. lung,breast,cervical,prostate,head_and_neck, anorectal

SEQ ID NO: 479066 - DNA, 897 bp, Homo sapiens; identical to SEQ ID NO: 331573
  chr2:200320451-200321348
  hypo
  sarcoma vs. liver_bileduct,ovary,cervical,anorectal, bladder_and_urothelial,colorectal,renal

SEQ ID NO: 479067 - DNA, 325 bp, Homo sapiens; identical to SEQ ID NO: 453144
  chr2:219232221-219232546
  hypo
  sarcoma vs. cervical,pancreas_gallbladder,colorectal

SEQ ID NO: 479068 - DNA, 32 bp, Homo sapiens; identical to SEQ ID NO: 357453
  chr2:219232859-219232891
  hypo
  sarcoma vs. cervical,pancreas_gallbladder,colorectal

SEQ ID NO: 479069 - DNA, 113 bp, Homo sapiens; identical to SEQ ID NO: 337874
  chr2:220316370-220316483
  hypo
  sarcoma vs. renal

SEQ ID NO: 479070 - DNA, 99 bp, Homo sapiens; identical to SEQ ID NO: 478409
  chr2:220378995-220379094
  hypo
  sarcoma vs. cervical,bladder_and_urothelial,anorectal, lung,uterine

SEQ ID NO: 479071 - DNA, 314 bp, Homo sapiens; identical to SEQ ID NO: 337945
  chr2:239949585-239949899
  hypo
  sarcoma vs. melanoma

SEQ ID NO: 479072 - DNA, 83 bp, Homo sapiens
  chr2:240270283-240270366
  hypo
  sarcoma vs. liver_bileduct,melanoma
cgtgggctttccgtccacactcccggtttcatgccagggactctggcttcaaggcagaggctctgtgtcctgacaaacgcatc

SEQ ID NO: 479073 - DNA, 516 bp, Homo sapiens; identical to SEQ ID NO: 363154
  chr2:240270511-240271027
  hypo
  sarcoma vs. liver_bileduct,melanoma

SEQ ID NO: 479074 - DNA, 296 bp, Homo sapiens; identical to SEQ ID NO: 337965
  chr2:240906462-240906758
  hypo
  sarcoma vs. upper_gi,liver_bileduct,pancreas_gallbladder, breast,lymphoid_neoplasm,lung,head_and_neck

SEQ ID NO: 479075 - DNA, 213 bp, Homo sapiens; identical to SEQ ID NO: 337967
  chr2:240930596-240930809
  hypo
  sarcoma vs. melanoma

SEQ ID NO: 479076 - DNA, 2 bp, Homo sapiens
  chr2:241393134-241393136
  hypo
  sarcoma vs. myeloid_neoplasm,uterine,breast,thyroid, prostate
cg

SEQ ID NO: 479077 - DNA, 112 bp, Homo sapiens; identical to SEQ ID NO: 357518
  chr2:241393469-241393581
  hypo
  sarcoma vs. myeloid_neoplasm,uterine,breast,thyroid, prostate

SEQ ID NO: 479078 - DNA, 585 bp, Homo sapiens; identical to SEQ ID NO: 455929
  chr20:30193272-30193857
  hypo
  sarcoma vs. lung,liver_bileduct,uterine,renal, pancreas_gallbladder,colorectal,multiple_myeloma,thyroid, cervical

SEQ ID NO: 479079 - DNA, 189 bp, Homo sapiens; identical to SEQ ID NO: 345629
  chr20:30193992-30194181
  hypo
  sarcoma vs. lung,liver_bileduct,uterine,renal, pancreas_gallbladder,colorectal,multiple_myeloma,thyroid, cervical

SEQ ID NO: 479080 - DNA, 534 bp, Homo sapiens; identical to SEQ ID NO: 336423
  chr20:34652354-34652888
  hypo
  sarcoma vs. cervical,lung,pancreas_gallbladder, multiple_myeloma,colorectal,renal,anorectal,breast, bladder_and_urothelial,upper_gi,prostate,head_and_neck, myeloid_neoplasm,thyroid

SEQ ID NO: 479081 - DNA, 431 bp, Homo sapiens; identical to SEQ ID NO: 356270
  chr20:35155295-35155726
  hypo
  sarcoma vs. liver_bileduct,melanoma,head_and_neck, pancreas_gallbladder,lung,lymphoid_neoplasm,prostate

SEQ ID NO: 479082 - DNA, 106 bp, Homo sapiens; identical to SEQ ID NO: 344238
  chr20:37596775-37596881
  hypo
  sarcoma vs. liver_bileduct,lung,ovary,renal, head_and_neck,bladder_and_urothelial

SEQ ID NO: 479083 - DNA, 184 bp, Homo sapiens; identical to SEQ ID NO: 368348
  chr20:42804035-42804219
  hypo
  sarcoma vs. upper_gi

SEQ ID NO: 479084 - DNA, 982 bp, Homo sapiens; identical to SEQ ID NO: 336464
  chr20:48598700-48599682
  hypo
  sarcoma vs. cervical,uterine,lung,ovary,anorectal,breast, colorectal,prostate,upper_gi,bladder_and_urothelial,non_cancer, head_and_neck,thyroid

SEQ ID NO: 479085 - DNA, 175 bp, Homo sapiens; identical to SEQ ID NO: 344283
  chr20:49197887-49198062
  hypo
  sarcoma vs. lung

SEQ ID NO: 479086 - DNA, 571 bp, Homo sapiens; identical to SEQ ID NO: 467112
  chr20:50383675-50384246
  hypo
  sarcoma vs. liver_bileduct

SEQ ID NO: 479087 - DNA, 113 bp, Homo sapiens; identical to SEQ ID NO: 345643
  chr20:57225466-57225579
  hypo
  sarcoma vs. thyroid,myeloid_neoplasm,non_cancer, multiple_myeloma

SEQ ID NO: 479088 - DNA, 390 bp, Homo sapiens; identical to SEQ ID NO: 347694
  chr20:62273399-62273789
  hypo
  sarcoma vs. breast,ovary,lung,cervical,head_and_neck, upper_gi,liver_bileduct,anorectal,prostate,colorectal, pancreas_gallbladder,uterine,renal,multiple_myeloma, lymphoid_neoplasm,non_cancer,thyroid,bladder_and_urothelial,
  CONT. FROM ABOVE: melanoma

SEQ ID NO: 479089 - DNA, 345 bp, Homo sapiens; identical to SEQ ID NO: 345646
  chr20:62495236-62495581
  hypo
  sarcoma vs. prostate,lymphoid_neoplasm,breast, myeloid_neoplasm,thyroid,head_and_neck,renal,colorectal, bladder_and_urothelial,upper_gi,cervical,non_cancer, pancreas_gallbladder,uterine,lung,multiple_myeloma,anorectal

SEQ ID NO: 479090 - DNA, 235 bp, Homo sapiens; identical to SEQ ID NO: 375207
  chr21:30670777-30671012
  hypo
  sarcoma vs. ovary

SEQ ID NO: 479091 - DNA, 209 bp, Homo sapiens; identical to SEQ ID NO: 344516
  chr21:44444714-44444923
  hypo
  sarcoma vs. lung,head_and_neck,melanoma, lymphoid_neoplasm,pancreas_gallbladder

SEQ ID NO: 479092 - DNA, 180 bp, Homo sapiens
  chr21:44840677-44840857
  hypo
  sarcoma vs. melanoma
cggggacggcaggcgcaaggcacaagcctgtgcagcaagggcacccgtccaccctcgaaatagggcactgagaaggcatccatgggctgggtttctcccgcagcccacagtaacctgggcctgattcccagactcaacaaggactcagaagccagccacgaaggggctgcaggagacaca

SEQ ID NO: 479093 - DNA, 81 bp, Homo sapiens; identical to SEQ ID NO: 368579
  chr21:44841527-44841608
  hypo
  sarcoma vs. melanoma

SEQ ID NO: 479094 - DNA, 307 bp, Homo sapiens; identical to SEQ ID NO: 368683
  chr21:47475683-47475990
  hypo
  sarcoma vs. melanoma,lymphoid_neoplasm,uterine,upper_gi, prostate,breast,myeloid_neoplasm

SEQ ID NO: 479095 - DNA, 273 bp, Homo sapiens; identical to SEQ ID NO: 362015
  chr21:47649460-47649733
  hypo
  sarcoma vs. head_and_neck,lung,liver_bileduct,upper_gi, prostate,colorectal

SEQ ID NO: 479096 - DNA, 410 bp, Homo sapiens; identical to SEQ ID NO: 344733
  chr22:31483882-31484292
  hypo
  sarcoma vs. melanoma,liver_bileduct,pancreas_gallbladder, head_and_neck,lung

SEQ ID NO: 479097 - DNA, 212 bp, Homo sapiens; identical to SEQ ID NO: 344734
  chr22:31486794-31487006
  hypo
  sarcoma vs. lymphoid_neoplasm,melanoma,liver_bileduct, head_and_neck,lung,upper_gi,pancreas_gallbladder

SEQ ID NO: 479098 - DNA, 425 bp, Homo sapiens; identical to SEQ ID NO: 344735
  chr22:31487263-31487688
  hypo
  sarcoma vs. liver_bileduct,upper_gi,head_and_neck,lung, melanoma,cervical,breast,anorectal,renal,lymphoid_neoplasm, pancreas_gallbladder

SEQ ID NO: 479099 - DNA, 345 bp, Homo sapiens; identical to SEQ ID NO: 356525
  chr22:31489493-31489838
  hypo
  sarcoma vs. lymphoid_neoplasm,liver_bileduct,melanoma, ovary,lung,head_and_neck,upper_gi,pancreas_gallbladder,breast, renal

SEQ ID NO: 479100 - DNA, 96 bp, Homo sapiens; identical to SEQ ID NO: 356526
  chr22:31495078-31495174
  hypo
  sarcoma vs. lymphoid_neoplasm,melanoma,liver_bileduct, lung,upper_gi,breast,cervical

SEQ ID NO: 479101 - DNA, 365 bp, Homo sapiens; identical to SEQ ID NO: 356527
  chr22:32078028-32078393
  hypo
  sarcoma vs. liver_bileduct,colorectal,lung,renal, head_and_neck,lymphoid_neoplasm,pancreas_gallbladder

SEQ ID NO: 479102 - DNA, 123 bp, Homo sapiens; identical to SEQ ID NO: 362064
  chr22:38966046-38966169
  hypo
  sarcoma vs. lymphoid_neoplasm

SEQ ID NO: 479103 - DNA, 554 bp, Homo sapiens; identical to SEQ ID NO: 467179
  chr22:45097777-45098331
  hypo
  sarcoma vs. melanoma,ovary,lung,pancreas_gallbladder, renal,uterine,upper_gi

SEQ ID NO: 479104 - DNA, 254 bp, Homo sapiens; identical to SEQ ID NO: 467180
  chr22:45098381-45098635
  hypo
  sarcoma vs. melanoma,ovary,lung,pancreas_gallbladder, renal,uterine,upper_gi

SEQ ID NO: 479105 - DNA, 342 bp, Homo sapiens; identical to SEQ ID NO: 368846
  chr22:45607771-45608113
  hypo
  sarcoma vs. lymphoid_neoplasm,lung,upper_gi

SEQ ID NO: 479106 - DNA, 209 bp, Homo sapiens; identical to SEQ ID NO: 344837
  chr22:47075172-47075381
  hypo
  sarcoma vs. liver_bileduct

SEQ ID NO: 479107 - DNA, 47 bp, Homo sapiens
  chr22:49943122-49943169
  hypo
  sarcoma vs. melanoma
cgcataggcagaggtggcttcacagcagcgggcaagtgggggaccct

SEQ ID NO: 479108 - DNA, 72 bp, Homo sapiens; identical to SEQ ID NO: 383602
  chr22:49943364-49943436
  hypo
  sarcoma vs. melanoma

SEQ ID NO: 479109 - DNA, 232 bp, Homo sapiens; identical to SEQ ID NO: 475668
  chr3:5018754-5018986
  hypo
  sarcoma vs. melanoma,breast,bladder_and_urothelial, multiple_myeloma,renal,lymphoid_neoplasm,myeloid_neoplasm, colorectal,non_cancer,liver_bileduct,uterine,upper_gi, pancreas_gallbladder,cervical

SEQ ID NO: 479110 - DNA, 143 bp, Homo sapiens; identical to SEQ ID NO: 345077
  chr3:5019132-5019275
  hypo
  sarcoma vs. melanoma,breast,bladder_and_urothelial, multiple_myeloma,renal,lymphoid_neoplasm,myeloid_neoplasm, colorectal,non_cancer,liver_bileduct,uterine,upper_gi, pancreas_gallbladder,cervical

SEQ ID NO: 479111 - DNA, 33 bp, Homo sapiens
  chr3:13367336-13367369
  hypo
  sarcoma vs. head_and_neck,cervical
cgtcacggatcccacggcccgggccacagccac

SEQ ID NO: 479112 - DNA, 156 bp, Homo sapiens; identical to SEQ ID NO: 363217
  chr3:13367420-13367576
  hypo
  sarcoma vs. head_and_neck,cervical

SEQ ID NO: 479113 - DNA, 269 bp, Homo sapiens; identical to SEQ ID NO: 331711
  chr3:23957838-23958107
  hypo
  sarcoma vs. melanoma

SEQ ID NO: 479114 - DNA, 989 bp, Homo sapiens; identical to SEQ ID NO: 331712
  chr3:24536360-24537349
  hypo
  sarcoma vs. liver_bileduct,uterine,pancreas_gallbladder, cervical,prostate,anorectal,breast,lung,head_and_neck,renal, thyroid,ovary,bladder_and_urothelial,upper_gi,colorectal, non_cancer,multiple_myeloma,myeloid_neoplasm

SEQ ID NO: 479115 - DNA, 167 bp, Homo sapiens; identical to SEQ ID NO: 331742
  chr3:41240162-41240329
  hypo
  sarcoma vs. lung

SEQ ID NO: 479116 - DNA, 9 bp, Homo sapiens
  chr3:45188139-45188148
  hypo
  sarcoma vs. upper_gi,lung
gcgaaggtc

SEQ ID NO: 479117 - DNA, 786 bp, Homo sapiens; identical to SEQ ID NO: 457991
  chr3:67048291-67049077
  hypo
  sarcoma vs. lymphoid_neoplasm

SEQ ID NO: 479118 - DNA, 264 bp, Homo sapiens; identical to SEQ ID NO: 338134
  chr3:71036199-71036463
  hypo
  sarcoma vs. liver_bileduct,lung,head_and_neck

SEQ ID NO: 479119 - DNA, 832 bp, Homo sapiens; identical to SEQ ID NO: 345097
  chr3:113251180-113252012
  hypo
  sarcoma vs. cervical,uterine

SEQ ID NO: 479120 - DNA, 343 bp, Homo sapiens; identical to SEQ ID NO: 376849
  chr3:123049661-123050004
  hypo
  sarcoma vs. melanoma

SEQ ID NO: 479121 - DNA, 154 bp, Homo sapiens; identical to SEQ ID NO: 338178
  chr3:127505560-127505714
  hypo
  sarcoma vs. breast,lymphoid_neoplasm,melanoma, head_and_neck

SEQ ID NO: 479122 - DNA, 79 bp, Homo sapiens; identical to SEQ ID NO: 338207
  chr3:139352994-139353073
  hypo

SEQ ID NO: 479123 - DNA, 15 bp, Homo sapiens
  chr3:142837817-142837832
  hypo
  sarcoma vs. ovary,myeloid_neoplasm
cgggacaagtatttt

SEQ ID NO: 479124 - DNA, 124 bp, Homo sapiens; identical to SEQ ID NO: 338271
  chr3:184057066-184057190
  hypo
  sarcoma vs. liver_bileduct,melanoma

SEQ ID NO: 479125 - DNA, 14 bp, Homo sapiens
  chr3:193858590-193858604
  hypo
  sarcoma vs. liver_bileduct
cggcctcgggcaca

SEQ ID NO: 479126 - DNA, 247 bp, Homo sapiens; identical to SEQ ID NO: 478523
  chr3:193858636-193858883
  hypo
  sarcoma vs. liver_bileduct

SEQ ID NO: 479127 - DNA, 261 bp, Homo sapiens; identical to SEQ ID NO: 370326
  chr3:193858949-193859210
  hypo
  sarcoma vs. liver_bileduct

SEQ ID NO: 479128 - DNA, 130 bp, Homo sapiens; identical to SEQ ID NO: 476413
  chr4:1205845-1205975
  hypo
  sarcoma vs. liver_bileduct,melanoma

SEQ ID NO: 479129 - DNA, 269 bp, Homo sapiens; identical to SEQ ID NO: 353446
  chr4:1206025-1206294
  hypo
  sarcoma vs. liver_bileduct,melanoma

SEQ ID NO: 479130 - DNA, 342 bp, Homo sapiens; identical to SEQ ID NO: 353485
  chr4:10087759-10088101
  hypo
  sarcoma vs. liver_bileduct

SEQ ID NO: 479131 - DNA, 141 bp, Homo sapiens; identical to SEQ ID NO: 478536
  chr4:16228990-16229131
  hypo
  sarcoma vs. liver_bileduct

SEQ ID NO: 479132 - DNA, 273 bp, Homo sapiens; identical to SEQ ID NO: 357845
  chr4:16229202-16229475
  hypo
  sarcoma vs. liver_bileduct

SEQ ID NO: 479133 - DNA, 786 bp, Homo sapiens; identical to SEQ ID NO: 478539
  chr4:36245423-36246209
  hypo
  sarcoma vs. liver_bileduct,ovary,pancreas_gallbladder, colorectal

SEQ ID NO: 479134 - DNA, 131 bp, Homo sapiens; identical to SEQ ID NO: 349926
  chr4:36246257-36246388
  hypo
  sarcoma vs. liver_bileduct,ovary,pancreas_gallbladder, colorectal

SEQ ID NO: 479135 - DNA, 94 bp, Homo sapiens; identical to SEQ ID NO: 458065
  chr4:57687545-57687639
  hypo
  sarcoma vs. myeloid_neoplasm,ovary,lung,uterine, colorectal,head_and_neck,non_cancer

SEQ ID NO: 479136 - DNA, 761 bp, Homo sapiens; identical to SEQ ID NO: 346652
  chr4:124317751-124318512
  hypo
  sarcoma vs. head_and_neck,lung,liver_bileduct, pancreas_gallbladder,ovary,renal,prostate,breast,colorectal, upper_gi,cervical,anorectal,uterine,myeloid_neoplasm, bladder_and_urothelial,non_cancer,multiple_myeloma,thyroid

SEQ ID NO: 479137 - DNA, 942 bp, Homo sapiens; identical to SEQ ID NO: 469199
  chr4:124318042-124318984
  hypo
  sarcoma vs. lung,liver_bileduct,colorectal,head_and_neck

SEQ ID NO: 479138 - DNA, 824 bp, Homo sapiens; identical to SEQ ID NO: 332200
  chr4:142557243-142558067
  hypo
  sarcoma vs. liver_bileduct,lung

SEQ ID NO: 479139 - DNA, 20 bp, Homo sapiens
  chr4:154713481-154713501
  hypo
  sarcoma vs. myeloid_neoplasm,bladder_and_urothelial, breast,renal,non_cancer
cgttacatgtgcctcggtga

SEQ ID NO: 479140 - DNA, 192 bp, Homo sapiens; identical to SEQ ID NO: 350003
  chr4:154714010-154714202
  hypo
  sarcoma vs. myeloid_neoplasm,bladder_and_urothelial, breast,renal,non_cancer

SEQ ID NO: 479141 - DNA, 195 bp, Homo sapiens
  chr5:2007541-2007736
  hypo
  sarcoma vs. renal,lymphoid_neoplasm
cgaggaatgacaatgaatgttggagagcctctcccgcagatgggtggcacggcctcagcctgagggaaacgtgttcccatcccgctccgggggcaagtccccgccggctcggaccccagggaggtggaggcaggcaccgtccccttgtccgggtgaccctgtgtggcctccctgctaagcccgcagcctgggctg

SEQ ID NO: 479142 - DNA, 36 bp, Homo sapiens; identical to SEQ ID NO: 353584
  chr5:2007797-2007833
  hypo
  sarcoma vs. renal,lymphoid_neoplasm

SEQ ID NO: 479143 - DNA, 328 bp, Homo sapiens; identical to SEQ ID NO: 332354
  chr5:43557434-43557762
  hypo
  sarcoma vs. head_and_neck,bladder_and_urothelial, anorectal,breast,lung,ovary,lymphoid_neoplasm,renal,uterine, colorectal,prostate,pancreas_gallbladder,multiple_myeloma, upper_gi,non_cancer,thyroid,liver_bileduct,cervical,melanoma

SEQ ID NO: 479144 - DNA, 552 bp, Homo sapiens; identical to SEQ ID NO: 358113
  chr5:56112644-56113196
  hypo
  sarcoma vs. ovary,anorectal,uterine,head_and_neck, pancreas_gallbladder,breast,upper_gi,colorectal, multiple_myeloma

SEQ ID NO: 479145 - DNA, 53 bp, Homo sapiens; identical to SEQ ID NO: 453291
  chr5:75698192-75698245
  hypo
  sarcoma vs. colorectal,pancreas_gallbladder,uterine, breast,cervical,prostate,upper_gi,non_cancer

SEQ ID NO: 479146 - DNA, 916 bp, Homo sapiens; identical to SEQ ID NO: 453292
  chr5:75698274-75699190
  hypo
  sarcoma vs. colorectal,pancreas_gallbladder,uterine, breast,cervical,prostate,upper_gi,non_cancer

SEQ ID NO: 479147 - DNA, 173 bp, Homo sapiens; identical to SEQ ID NO: 338750
  chr5:77291967-77292140
  hypo
  sarcoma vs. liver_bileduct,renal,lymphoid_neoplasm, upper_gi,breast,bladder_and_urothelial,head_and_neck

SEQ ID NO: 479148 - DNA, 44 bp, Homo sapiens; identical to SEQ ID NO: 477696
  chr5:78105396-78105440
  hypo
  sarcoma vs. melanoma

SEQ ID NO: 479149 - DNA, 70 bp, Homo sapiens; identical to SEQ ID NO: 353624
  chr5:78105545-78105615
  hypo
  sarcoma vs. melanoma

SEQ ID NO: 479150 - DNA, 281 bp, Homo sapiens; identical to SEQ ID NO: 350137
  chr5:109024730-109025011
  hypo
  sarcoma vs. cervical,upper_gi,pancreas_gallbladder, breast,lymphoid_neoplasm,liver_bileduct

SEQ ID NO: 479151 - DNA, 173 bp, Homo sapiens; identical to SEQ ID NO: 477065
  chr5:134370281-134370454
  hypo
  sarcoma vs. cervical,lung,head_and_neck,breast

SEQ ID NO: 479152 - DNA, 38 bp, Homo sapiens; identical to SEQ ID NO: 358244
  chr5:134370508-134370546
  hypo
  sarcoma vs. cervical,lung,head_and_neck,breast

SEQ ID NO: 479153 - DNA, 257 bp, Homo sapiens; identical to SEQ ID NO: 338800
  chr5:134579620-134579877
  hypo
  sarcoma vs. lymphoid_neoplasm

SEQ ID NO: 479154 - DNA, 276 bp, Homo sapiens; identical to SEQ ID NO: 332516
  chr5:139554306-139554582
  hypo
  sarcoma vs. ovary,lung,upper_gi,pancreas_gallbladder, colorectal

SEQ ID NO: 479155 - DNA, 625 bp, Homo sapiens; identical to SEQ ID NO: 456042
  chr5:142781875-142782500
  hypo
  sarcoma vs. anorectal,multiple_myeloma,myeloid_neoplasm, non_cancer,renal,lymphoid_neoplasm

SEQ ID NO: 479156 - DNA, 78 bp, Homo sapiens; identical to SEQ ID NO: 456043
  chr5:142782625-142782703
  hypo
  sarcoma vs. anorectal,multiple_myeloma,myeloid_neoplasm, non_cancer,renal,lymphoid_neoplasm

SEQ ID NO: 479157 - DNA, 116 bp, Homo sapiens; identical to SEQ ID NO: 338831
  chr5:156811500-156811616
  hypo
  sarcoma vs. melanoma

SEQ ID NO: 479158 - DNA, 143 bp, Homo sapiens; identical to SEQ ID NO: 464637
  chr5:172665306-172665449
  hypo
  sarcoma vs. ovary

SEQ ID NO: 479159 - DNA, 297 bp, Homo sapiens; identical to SEQ ID NO: 358315
  chr5:172665949-172666246
  hypo
  sarcoma vs. ovary

SEQ ID NO: 479160 - DNA, 121 bp, Homo sapiens; identical to SEQ ID NO: 363905
  chr5:176911172-176911293
  hypo
  sarcoma vs. melanoma

SEQ ID NO: 479161 - DNA, 842 bp, Homo sapiens; identical to SEQ ID NO: 353703
  chr5:176918897-176919739
  hypo
  sarcoma vs. melanoma,lymphoid_neoplasm,breast, bladder_and_urothelial,renal,multiple_myeloma,anorectal,lung

SEQ ID NO: 479162 - DNA, 59 bp, Homo sapiens; identical to SEQ ID NO: 338888
  chr5:176922905-176922964
  hypo
  sarcoma vs. head_and_neck,prostate,lymphoid_neoplasm, breast,lung

SEQ ID NO: 479163 - DNA, 684 bp, Homo sapiens; identical to SEQ ID NO: 332639
  chr6:3457545-3458229
  hypo
  sarcoma vs. ovary,colorectal,breast,lung, pancreas_gallbladder,cervical,head_and_neck,uterine

SEQ ID NO: 479164 - DNA, 95 bp, Homo sapiens; identical to SEQ ID NO: 200248
  chr6:4775543-4775638
  hypo
  sarcoma vs. ovary

SEQ ID NO: 479165 - DNA, 305 bp, Homo sapiens; identical to SEQ ID NO: 458177
  chr6:4775640-4775945
  hypo
  sarcoma vs. ovary

SEQ ID NO: 479166 - DNA, 127 bp, Homo sapiens; identical to SEQ ID NO: 338976
  chr6:7891513-7891640
  hypo
  sarcoma vs. melanoma,head_and_neck,upper_gi, lymphoid_neoplasm,lung,liver_bileduct

SEQ ID NO: 479167 - DNA, 94 bp, Homo sapiens; identical to SEQ ID NO: 338977
  chr6:7891873-7891967
  hypo
  sarcoma vs. melanoma

SEQ ID NO: 479168 - DNA, 201 bp, Homo sapiens
  chr6:26025540-26025741
  hypo
  sarcoma vs. melanoma
cgggattacaggcgtgagccaccttgccgggcctatatttcttaagctctatgtttcgttctgaagcttgaagtgggtggaagcaaactgatagaatttggagaggtggttaggcatcccgggaatgagaaacagcccgaagctgccactatcacaggctttggcattgctagaagttaacgtggcacttacagctaggcc

SEQ ID NO: 479169 - DNA, 214 bp, Homo sapiens; identical to SEQ ID NO: 464663
  chr6:26198924-26199138
  hypo
  sarcoma vs. melanoma,cervical,uterine,anorectal, bladder_and_urothelial,head_and_neck

SEQ ID NO: 479170 - DNA, 16 bp, Homo sapiens
  chr6:26199167-26199183
  hypo
  sarcoma vs. melanoma,cervical,uterine,anorectal, bladder_and_urothelial,head_and_neck
tgactttacccagcaa

SEQ ID NO: 479171 - DNA, 16 bp, Homo sapiens
  chr6:26199167-26199183
  hypo
  sarcoma vs. melanoma,cervical,anorectal, bladder_and_urothelial,head_and_neck,uterine
tgactttacccagcaa

SEQ ID NO: 479172 - DNA, 2 bp, Homo sapiens
  chr6:26199878-26199880
  hypo
  sarcoma vs. melanoma,cervical,anorectal, bladder_and_urothelial,head_and_neck,uterine
gc

SEQ ID NO: 479173 - DNA, 370 bp, Homo sapiens; identical to SEQ ID NO: 469334
  chr6:37666475-37666845
  hypo
  sarcoma vs. ovary,bladder_and_urothelial,lung,cervical, breast,prostate,head_and_neck,anorectal,upper_gi, pancreas_gallbladder,uterine,non_cancer,thyroid, multiple_myeloma

SEQ ID NO: 479174 - DNA, 218 bp, Homo sapiens; identical to SEQ ID NO: 345233
  chr6:37666866-37667084
  hypo
  sarcoma vs. ovary,bladder_and_urothelial,lung,cervical, breast,prostate,head_and_neck,anorectal,upper_gi, pancreas_gallbladder,uterine,non_cancer,thyroid, multiple_myeloma

SEQ ID NO: 479175 - DNA, 293 bp, Homo sapiens; identical to SEQ ID NO: 339057
  chr6:43641288-43641581
  hypo
  sarcoma vs. liver_bileduct

SEQ ID NO: 479176 - DNA, 78 bp, Homo sapiens; identical to SEQ ID NO: 377744
  chr6:57085548-57085626
  hypo
  sarcoma vs. head_and_neck,liver_bileduct

SEQ ID NO: 479177 - DNA, 265 bp, Homo sapiens; identical to SEQ ID NO: 456094
  chr6:111409052-111409317
  hypo

SEQ ID NO: 479178 - DNA, 274 bp, Homo sapiens; identical to SEQ ID NO: 456095
  chr6:111409368-111409642
  hypo

SEQ ID NO: 479179 - DNA, 132 bp, Homo sapiens; identical to SEQ ID NO: 478695
  chr6:142622583-142622715
  hypo
  sarcoma vs. melanoma,lung,upper_gi

SEQ ID NO: 479180 - DNA, 486 bp, Homo sapiens; identical to SEQ ID NO: 358663
  chr6:142622963-142623449
  hypo
  sarcoma vs. melanoma,lung,upper_gi

SEQ ID NO: 479181 - DNA, 520 bp, Homo sapiens; identical to SEQ ID NO: 346865
  chr6:158402113-158402633
  hypo
  sarcoma vs. pancreas_gallbladder,cervical, bladder_and_urothelial,renal,prostate,upper_gi,thyroid, liver_bileduct,non_cancer,multiple_myeloma,head_and_neck, colorectal,lung

SEQ ID NO: 479182 - DNA, 506 bp, Homo sapiens; identical to SEQ ID NO: 345259
  chr6:170124879-170125385
  hypo
  sarcoma vs. ovary,pancreas_gallbladder,uterine, multiple_myeloma,lung,cervical,colorectal,breast,anorectal, prostate,non_cancer,head_and_neck,bladder_and_urothelial, thyroid,myeloid_neoplasm,upper_gi,renal,lymphoid_neoplasm

SEQ ID NO: 479183 - DNA, 227 bp, Homo sapiens; identical to SEQ ID NO: 470726
  chr6:170339178-170339405
  hypo
  sarcoma vs. anorectal

SEQ ID NO: 479184 - DNA, 229 bp, Homo sapiens; identical to SEQ ID NO: 353862
  chr6:170339543-170339772
  hypo
  sarcoma vs. anorectal

SEQ ID NO: 479185 - DNA, 197 bp, Homo sapiens; identical to SEQ ID NO: 339224
  chr7:229498-229695
  hypo
  sarcoma vs. myeloid_neoplasm

SEQ ID NO: 479186 - DNA, 137 bp, Homo sapiens; identical to SEQ ID NO: 475092
  chr7:808392-808529
  hypo
  sarcoma vs. lymphoid_neoplasm,liver_bileduct

SEQ ID NO: 479187 - DNA, 242 bp, Homo sapiens; identical to SEQ ID NO: 475093
  chr7:808577-808819
  hypo
  sarcoma vs. lymphoid_neoplasm,liver_bileduct

SEQ ID NO: 479188 - DNA, 382 bp, Homo sapiens; identical to SEQ ID NO: 364209
  chr7:808848-809230
  hypo
  sarcoma vs. lymphoid_neoplasm,liver_bileduct

SEQ ID NO: 479189 - DNA, 372 bp, Homo sapiens; identical to SEQ ID NO: 353882
  chr7:907709-908081
  hypo
  sarcoma vs. lymphoid_neoplasm,lung,cervical,renal

SEQ ID NO: 479190 - DNA, 148 bp, Homo sapiens; identical to SEQ ID NO: 478711
  chr7:1708913-1709061
  hypo
  sarcoma vs. bladder_and_urothelial,breast,cervical, anorectal

SEQ ID NO: 479191 - DNA, 46 bp, Homo sapiens; identical to SEQ ID NO: 475105
  chr7:1970797-1970843
  hypo
  sarcoma vs. head_and_neck,lymphoid_neoplasm

SEQ ID NO: 479192 - DNA, 88 bp, Homo sapiens; identical to SEQ ID NO: 348188
  chr7:1970921-1971009
  hypo
  sarcoma vs. head_and_neck,lymphoid_neoplasm

SEQ ID NO: 479193 - DNA, 272 bp, Homo sapiens; identical to SEQ ID NO: 478713
  chr7:16793071-16793343
  hypo
  sarcoma vs. head_and_neck,upper_gi,lung,breast

SEQ ID NO: 479194 - DNA, 182 bp, Homo sapiens; identical to SEQ ID NO: 114656
  chr7:16793380-16793562
  hypo
  sarcoma vs. head_and_neck,upper_gi,lung,breast

SEQ ID NO: 479195 - DNA, 28 bp, Homo sapiens
  chr7:25891919-25891947
  hypo
  sarcoma vs. myeloid_neoplasm,thyroid
cgttacagggtgggactgggtggagcag

SEQ ID NO: 479196 - DNA, 189 bp, Homo sapiens; identical to SEQ ID NO: 461248
  chr7:25892243-25892432
  hypo
  sarcoma vs. myeloid_neoplasm,thyroid

SEQ ID NO: 479197 - DNA, 219 bp, Homo sapiens; identical to SEQ ID NO: 371555
  chr7:47621704-47621923
  hypo
  sarcoma vs. liver_bileduct

SEQ ID NO: 479198 - DNA, 235 bp, Homo sapiens; identical to SEQ ID NO: 358902
  chr7:98030416-98030651
  hypo
  sarcoma vs. liver_bileduct

SEQ ID NO: 479199 - DNA, 831 bp, Homo sapiens; identical to SEQ ID NO: 339574
  chr7:100402457-100403288
  hypo
  sarcoma vs. head_and_neck,lung,lymphoid_neoplasm, bladder_and_urothelial,melanoma,liver_bileduct,upper_gi, colorectal,pancreas_gallbladder,renal

SEQ ID NO: 479200 - DNA, 487 bp, Homo sapiens; identical to SEQ ID NO: 350630
  chr7:101460542-101461029
  hypo
  sarcoma vs. head_and_neck,liver_bileduct,breast, pancreas_gallbladder,lung,uterine,ovary,colorectal,anorectal, prostate,bladder_and_urothelial,upper_gi,cervical,renal, myeloid_neoplasm,thyroid,non_cancer

SEQ ID NO: 479201 - DNA, 332 bp, Homo sapiens; identical to SEQ ID NO: 354030
  chr7:101566736-101567068
  hypo
  sarcoma vs. melanoma,head_and_neck

SEQ ID NO: 479202 - DNA, 82 bp, Homo sapiens; identical to SEQ ID NO: 460499
  chr7:101627660-101627742
  hypo
  sarcoma vs. melanoma,lymphoid_neoplasm,lung

SEQ ID NO: 479203 - DNA, 282 bp, Homo sapiens; identical to SEQ ID NO: 354034
  chr7:101627846-101628128
  hypo
  sarcoma vs. melanoma,lymphoid_neoplasm,lung

SEQ ID NO: 479204 - DNA, 194 bp, Homo sapiens; identical to SEQ ID NO: 339621
  chr7:129470923-129471117
  hypo
  sarcoma vs. anorectal,lymphoid_neoplasm,melanoma,thyroid, liver_bileduct,cervical,breast,upper_gi,colorectal,prostate, head_and_neck,bladder_and_urothelial,non_cancer,uterine,lung, renal,pancreas_gallbladder,multiple_myeloma

SEQ ID NO: 479205 - DNA, 362 bp, Homo sapiens; identical to SEQ ID NO: 345285
  chr7:139930346-139930708
  hypo
  sarcoma vs. ovary,cervical,thyroid

SEQ ID NO: 479206 - DNA, 846 bp, Homo sapiens; identical to SEQ ID NO: 333298
  chr7:150671471-150672317
  hypo
  sarcoma vs. ovary,lung,colorectal,non_cancer,uterine, prostate,bladder_and_urothelial,lymphoid_neoplasm,renal, myeloid_neoplasm,thyroid,breast,upper_gi,multiple_myeloma, pancreas_gallbladder

SEQ ID NO: 479207 - DNA, 650 bp, Homo sapiens; identical to SEQ ID NO: 348277
  chr7:157202474-157203124
  hypo
  sarcoma vs. melanoma

SEQ ID NO: 479208 - DNA, 788 bp, Homo sapiens; identical to SEQ ID NO: 462110
  chr7:158066162-158066950
  hypo
  sarcoma vs. lymphoid_neoplasm

SEQ ID NO: 479209 - DNA, 471 bp, Homo sapiens; identical to SEQ ID NO: 462111
  chr7:158066479-158066950
  hypo
  sarcoma vs. lymphoid_neoplasm

SEQ ID NO: 479210 - DNA, 219 bp, Homo sapiens; identical to SEQ ID NO: 348289
  chr7:158067069-158067288
  hypo
  sarcoma vs. lymphoid_neoplasm

SEQ ID NO: 479211 - DNA, 294 bp, Homo sapiens
  chr7:158277387-158277681
  hypo
  sarcoma vs. lymphoid_neoplasm
cgtgacttttgtgactcggtttcttcctctgagcacggcgattcccaggttcctccgcgtcagtgtgccggtgcttcctgcctccctttccacggccggacagcactccaccatcacagacgtcctcggttcctggtggttttctgccctcttcagtggagaaagggcttggaatagaagaagctgcagttggagacgtgaaggctgtggctgtgacgccgccacggggagtcggctgcaggaggagcctccccaccatcagcgtggccggcggagtgagccacgagcgcaagg

SEQ ID NO: 479212 - DNA, 275 bp, Homo sapiens; identical to SEQ ID NO: 212079
  chr7:158277727-158278002
  hypo
  sarcoma vs. lymphoid_neoplasm

SEQ ID NO: 479213 - DNA, 878 bp, Homo sapiens; identical to SEQ ID NO: 346966
  chr8:22436855-22437733
  hypo
  sarcoma vs. liver_bileduct,lung,upper_gi, pancreas_gallbladder,anorectal,colorectal, bladder_and_urothelial,multiple_myeloma,breast,uterine,prostate, ovary,cervical,myeloid_neoplasm,thyroid,non_cancer,
  CONT. FROM ABOVE: head_and_neck,renal

SEQ ID NO: 479214 - DNA, 20 bp, Homo sapiens
  chr8:23020932-23020952
  hypo
  sarcoma vs. renal,colorectal,cervical,non_cancer, upper_gi,anorectal,pancreas_gallbladder,liver_bileduct, myeloid_neoplasm,prostate,multiple_myeloma,uterine,ovary
cgaacgaacgaacgaacgaa

SEQ ID NO: 479215 - DNA, 25 bp, Homo sapiens
  chr8:23021107-23021132
  hypo
  sarcoma vs. renal,colorectal,cervical,non_cancer, upper_gi,anorectal,pancreas_gallbladder,liver_bileduct, myeloid_neoplasm,prostate,multiple_myeloma,uterine,ovary
cggcccggtcgctcctgcccagccc

SEQ ID NO: 479216 - DNA, 127 bp, Homo sapiens; identical to SEQ ID NO: 345299
  chr8:23021590-23021717
  hypo
  sarcoma vs. renal,colorectal,cervical,non_cancer, upper_gi,anorectal,pancreas_gallbladder,liver_bileduct, myeloid_neoplasm,prostate,multiple_myeloma,uterine,ovary

SEQ ID NO: 479217 - DNA, 311 bp, Homo sapiens; identical to SEQ ID NO: 350731
  chr8:26148757-26149068
  hypo
  sarcoma vs. ovary,pancreas_gallbladder, bladder_and_urothelial,uterine,head_and_neck,lymphoid_neoplasm, prostate,renal,colorectal,upper_gi,breast,cervical,lung, anorectal,non_cancer

SEQ ID NO: 479218 - DNA, 837 bp, Homo sapiens; identical to SEQ ID NO: 478783
  chr8:29205985-29206822
  hypo
  sarcoma vs. melanoma,ovary,colorectal

SEQ ID NO: 479219 - DNA, 402 bp, Homo sapiens; identical to SEQ ID NO: 339882
  chr8:37702286-37702688
  hypo
  sarcoma vs. melanoma,liver_bileduct,upper_gi

SEQ ID NO: 479220 - DNA, 117 bp, Homo sapiens; identical to SEQ ID NO: 453446
  chr8:56014011-56014128
  hypo
  sarcoma vs. melanoma

SEQ ID NO: 479221 - DNA, 239 bp, Homo sapiens; identical to SEQ ID NO: 453448
  chr8:60030908-60031147
  hypo
  sarcoma vs. non_cancer,myeloid_neoplasm,thyroid

SEQ ID NO: 479222 - DNA, 43 bp, Homo sapiens; identical to SEQ ID NO: 453462
  chr8:69242761-69242804
  hypo
  sarcoma vs. melanoma,ovary,cervical,uterine, lymphoid_neoplasm,head_and_neck,anorectal,upper_gi, pancreas_gallbladder,breast,prostate,renal,colorectal

SEQ ID NO: 479223 - DNA, 57 bp, Homo sapiens; identical to SEQ ID NO: 453463
  chr8:69243011-69243068
  hypo
  sarcoma vs. melanoma,ovary,cervical,uterine, lymphoid_neoplasm,head_and_neck,anorectal,upper_gi, pancreas_gallbladder,breast,prostate,renal,colorectal

SEQ ID NO: 479224 - DNA, 311 bp, Homo sapiens; identical to SEQ ID NO: 333477
  chr8:71316520-71316831
  hypo
  sarcoma vs. renal,upper_gi,bladder_and_urothelial,lung, pancreas_gallbladder,colorectal,cervical

SEQ ID NO: 479225 - DNA, 142 bp, Homo sapiens; identical to SEQ ID NO: 457181
  chr8:81213177-81213319
  hypo
  sarcoma vs. colorectal,prostate,lymphoid_neoplasm, upper_gi,uterine,melanoma,non_cancer,anorectal

SEQ ID NO: 479226 - DNA, 327 bp, Homo sapiens; identical to SEQ ID NO: 354209
  chr8:81213356-81213683
  hypo
  sarcoma vs. colorectal,prostate,lymphoid_neoplasm, upper_gi,uterine,melanoma,non_cancer,anorectal

SEQ ID NO: 479227 - DNA, 41 bp, Homo sapiens; identical to SEQ ID NO: 478810
  chr8:102506365-102506406
  hypo
  sarcoma vs. ovary

SEQ ID NO: 479228 - DNA, 211 bp, Homo sapiens; identical to SEQ ID NO: 347008
  chr8:121824481-121824692
  hypo
  sarcoma vs. ovary,liver_bileduct,colorectal

SEQ ID NO: 479229 - DNA, 233 bp, Homo sapiens; identical to SEQ ID NO: 340008
  chr8:123830706-123830939
  hypo
  sarcoma vs. liver_bileduct,renal

SEQ ID NO: 479230 - DNA, 50 bp, Homo sapiens
  chr8:141559645-141559695
  hypo
  sarcoma vs. liver_bileduct,anorectal,head_and_neck, lymphoid_neoplasm,renal,colorectal,melanoma,myeloid_neoplasm, prostate,multiple_myeloma,thyroid
cggctaacttgccaccgtaacacagcagcctttaaaccgcgctcacgctg

SEQ ID NO: 479231 - DNA, 35 bp, Homo sapiens; identical to SEQ ID NO: 354256
  chr8:141559724-141559759
  hypo
  sarcoma vs. liver_bileduct,anorectal,head_and_neck, lymphoid_neoplasm,renal,colorectal,melanoma,myeloid_neoplasm, prostate,multiple_myeloma,thyroid

SEQ ID NO: 479232 - DNA, 172 bp, Homo sapiens; identical to SEQ ID NO: 378722
  chr8:141613224-141613396
  hypo
  sarcoma vs. head_and_neck

SEQ ID NO: 479233 - DNA, 813 bp, Homo sapiens; identical to SEQ ID NO: 478813
  chr8:142139026-142139839
  hypo
  sarcoma vs. multiple_myeloma,lymphoid_neoplasm,renal

SEQ ID NO: 479234 - DNA, 108 bp, Homo sapiens
  chr8:143509044-143509152
  hypo
  sarcoma vs. lymphoid_neoplasm
cggttcttcccacgtgggatattctggctgtacgcgcgtgaccgtgactgtggggactggcccagggcttgactgtggggactggcccagggcttttcagggttggag

SEQ ID NO: 479235 - DNA, 296 bp, Homo sapiens; identical to SEQ ID NO: 117271
  chr8:143556722-143557018
  hypo
  sarcoma vs. ovary,head_and_neck,uterine,colorectal

SEQ ID NO: 479236 - DNA, 284 bp, Homo sapiens; identical to SEQ ID NO: 455468
  chr8:144359694-144359978
  hypo
  sarcoma vs. thyroid,myeloid_neoplasm,renal,non_cancer, lymphoid_neoplasm,prostate,uterine,multiple_myeloma

SEQ ID NO: 479237 - DNA, 91 bp, Homo sapiens; identical to SEQ ID NO: 345960
  chr8:144360545-144360636
  hypo
  sarcoma vs. thyroid,myeloid_neoplasm,renal,non_cancer, lymphoid_neoplasm,prostate,uterine,multiple_myeloma

SEQ ID NO: 479238 - DNA, 538 bp, Homo sapiens; identical to SEQ ID NO: 364901
  chr8:144461002-144461540
  hypo
  sarcoma vs. ovary

SEQ ID NO: 479239 - DNA, 429 bp, Homo sapiens; identical to SEQ ID NO: 333598
  chr8:145733644-145734073
  hypo
  sarcoma vs. melanoma,liver_bileduct,anorectal

SEQ ID NO: 479240 - DNA, 265 bp, Homo sapiens; identical to SEQ ID NO: 478822
  chr9:34591191-34591456
  hypo

SEQ ID NO: 479241 - DNA, 31 bp, Homo sapiens; identical to SEQ ID NO: 359299
  chr9:34591656-34591687
  hypo

SEQ ID NO: 479242 - DNA, 473 bp, Homo sapiens; identical to SEQ ID NO: 472597
  chr9:79630544-79631017
  hypo
  sarcoma vs. multiple_myeloma,breast,non_cancer, myeloid_neoplasm,thyroid

SEQ ID NO: 479243 - DNA, 218 bp, Homo sapiens; identical to SEQ ID NO: 333696
  chr9:88355794-88356012
  hypo
  sarcoma vs. head_and_neck,melanoma,lung, lymphoid_neoplasm,ovary,breast

SEQ ID NO: 479244 - DNA, 156 bp, Homo sapiens; identical to SEQ ID NO: 453504
  chr9:93955774-93955930
  hypo
  sarcoma vs. pancreas_gallbladder,myeloid_neoplasm

SEQ ID NO: 479245 - DNA, 268 bp, Homo sapiens; identical to SEQ ID NO: 453505
  chr9:93956177-93956445
  hypo
  sarcoma vs. pancreas_gallbladder,myeloid_neoplasm

SEQ ID NO: 479246 - DNA, 131 bp, Homo sapiens; identical to SEQ ID NO: 478846
  chr9:112081563-112081694
  hypo
  sarcoma vs. breast,thyroid,prostate,colorectal, non_cancer

SEQ ID NO: 479247 - DNA, 355 bp, Homo sapiens; identical to SEQ ID NO: 478847
  chr9:112081773-112082128
  hypo
  sarcoma vs. breast,thyroid,prostate,colorectal, non_cancer

SEQ ID NO: 479248 - DNA, 53 bp, Homo sapiens; identical to SEQ ID NO: 478848
  chr9:112081641-112081694
  hypo
  sarcoma vs. breast,prostate,thyroid,colorectal, non_cancer

SEQ ID NO: 479249 - DNA, 860 bp, Homo sapiens; identical to SEQ ID NO: 350926
  chr9:112081773-112082633
  hypo
  sarcoma vs. breast,prostate,thyroid,colorectal, non_cancer

SEQ ID NO: 479250 - DNA, 178 bp, Homo sapiens; identical to SEQ ID NO: 333756
  chr9:113017465-113017643
  hypo
  sarcoma vs. liver_bileduct,head_and_neck,lung

SEQ ID NO: 479251 - DNA, 106 bp, Homo sapiens; identical to SEQ ID NO: 365017
  chr9:116299412-116299518
  hypo
  sarcoma vs. pancreas_gallbladder,upper_gi

SEQ ID NO: 479252 - DNA, 17 bp, Homo sapiens
  chr9:132403240-132403257
  hypo
  sarcoma vs. lymphoid_neoplasm
ttgcccagagtccggtc

SEQ ID NO: 479253 - DNA, 141 bp, Homo sapiens; identical to SEQ ID NO: 478862
  chr9:133308607-133308748
  hypo
  sarcoma vs. ovary

SEQ ID NO: 479254 - DNA, 68 bp, Homo sapiens; identical to SEQ ID NO: 478863
  chr9:133308769-133308837
  hypo
  sarcoma vs. ovary

SEQ ID NO: 479255 - DNA, 458 bp, Homo sapiens; identical to SEQ ID NO: 340368
  chr9:133760420-133760878
  hypo
  sarcoma vs. lymphoid_neoplasm,lung,head_and_neck, melanoma

SEQ ID NO: 479256 - DNA, 630 bp, Homo sapiens; identical to SEQ ID NO: 345338
  chr9:135286324-135286954
  hypo
  sarcoma vs. pancreas_gallbladder,multiple_myeloma

SEQ ID NO: 479257 - DNA, 520 bp, Homo sapiens; identical to SEQ ID NO: 350968
  chr9:139948370-139948890
  hypo
  sarcoma vs. lung,breast,colorectal,head_and_neck

SEQ ID NO: 479258 - DNA, 91 bp, Homo sapiens
  chr9:140107736-140107827
  hypo
  sarcoma vs. uterine,renal,multiple_myeloma,prostate, breast,non_cancer,myeloid_neoplasm,thyroid
gggaggccgctgccgacagcgttcccagggaggagcgtgacccagagccagtcatgcctcggaaccagagtgagaagagaaactgaccccc

SEQ ID NO: 479259 - DNA, 303 bp, Homo sapiens
  chr9:140107736-140108039
  hypo
  sarcoma vs. renal,myeloid_neoplasm,uterine,non_cancer, prostate,breast,multiple_myeloma,colorectal
gggaggccgctgccgacagcgttcccagggaggagcgtgacccagagccagtcatgcctcggaaccagagtgagaagagaaactgacccccgggaagatgcctggctctctccccagcacagagtttctcagctgaggagtgacccacatcttggctgggggcctggaggcctcagctgcctcaagtccctgcccagggatgagggcccatcagtgggacgaggccgcctgctcccacccacacaggctcattctctgcgagcagaggacctgctgcttggcaccctggcagctgccctggtc

SEQ ID NO: 479260 - DNA, 84 bp, Homo sapiens; identical to SEQ ID NO: 475206
  chr9:140107955-140108039
  hypo
  sarcoma vs. prostate,non_cancer,myeloid_neoplasm,uterine, breast,melanoma,multiple_myeloma,bladder_and_urothelial,renal, colorectal,lymphoid_neoplasm

SEQ ID NO: 479261 - DNA, 180 bp, Homo sapiens; identical to SEQ ID NO: 348399
  chr9:140108461-140108641
  hypo
  sarcoma vs. prostate,non_cancer,myeloid_neoplasm,uterine, breast,melanoma,multiple_myeloma,bladder_and_urothelial,renal, colorectal,lymphoid_neoplasm

SEQ ID NO: 479262 - DNA, 153 bp, Homo sapiens; identical to SEQ ID NO: 365189
  chr9:140333146-140333299
  hypo
  sarcoma vs. melanoma

SEQ ID NO: 479263 - DNA, 143 bp, Homo sapiens
  chr1:10854232-10854375
  hyper
  thyroid vs. lung
cgtgtgtgtgtgtgtgtgtgtgtgcgcgcgcgcgcgcgtcgtgggttgggcggggggacaccaagattatccggcgatctgttttccagtcccctcgtgcgctctcaccgcgcgcctgtaccagctcggagacgtcctaaatt

SEQ ID NO: 479264 - DNA, 386 bp, Homo sapiens; identical to SEQ ID NO: 349172
  chr1:10854661-10855047
  hyper
  thyroid vs. lung

SEQ ID NO: 479265 - DNA, 5 bp, Homo sapiens
  chr1:50888222-50888227
  hyper
  thyroid vs. lung,ovary,upper_gi,head_and_neck
cgcag

SEQ ID NO: 479266 - DNA, 438 bp, Homo sapiens; identical to SEQ ID NO: 464043
  chr1:90308855-90309293
  hyper
  thyroid vs. multiple_myeloma

SEQ ID NO: 479267 - DNA, 115 bp, Homo sapiens; identical to SEQ ID NO: 344961
  chr1:90309490-90309605
  hyper
  thyroid vs. multiple_myeloma

SEQ ID NO: 479268 - DNA, 135 bp, Homo sapiens; identical to SEQ ID NO: 349354
  chr1:171811643-171811778
  hyper
  thyroid vs. myeloid_neoplasm

SEQ ID NO: 479269 - DNA, 108 bp, Homo sapiens; identical to SEQ ID NO: 331033
  chr1:173683937-173684045
  hyper
  thyroid vs. lung,pancreas_gallbladder,ovary,uterine, colorectal,bladder_and_urothelial

SEQ ID NO: 479270 - DNA, 273 bp, Homo sapiens; identical to SEQ ID NO: 333909
  chr10:28968999-28969272
  hyper
  thyroid vs. myeloid_neoplasm

SEQ ID NO: 479271 - DNA, 153 bp, Homo sapiens; identical to SEQ ID NO: 359582
  chr10:69834338-69834491
  hyper
  thyroid vs. lung,ovary,multiple_myeloma

SEQ ID NO: 479272 - DNA, 239 bp, Homo sapiens; identical to SEQ ID NO: 359624
  chr10:91403644-91403883
  hyper

SEQ ID NO: 479273 - DNA, 314 bp, Homo sapiens; identical to SEQ ID NO: 334000
  chr10:94607767-94608081
  hyper
  thyroid vs. lung,ovary,sarcoma,multiple_myeloma, bladder_and_urothelial,upper_gi,uterine,renal,head_and_neck, prostate

SEQ ID NO: 479274 - DNA, 723 bp, Homo sapiens; identical to SEQ ID NO: 475294
  chr10:106097237-106097960
  hyper
  thyroid vs. multiple_myeloma,head_and_neck, myeloid_neoplasm,uterine,sarcoma,cervical

SEQ ID NO: 479275 - DNA, 165 bp, Homo sapiens; identical to SEQ ID NO: 351101
  chr10:106098025-106098190
  hyper
  thyroid vs. multiple_myeloma,head_and_neck, myeloid_neoplasm,uterine,sarcoma,cervical

SEQ ID NO: 479276 - DNA, 457 bp, Homo sapiens; identical to SEQ ID NO: 334070
  chr10:114135846-114136303
  hyper
  thyroid vs. myeloid_neoplasm

SEQ ID NO: 479277 - DNA, 76 bp, Homo sapiens; identical to SEQ ID NO: 359749
  chr11:3181650-3181726
  hyper
  thyroid vs. bladder_and_urothelial,ovary,cervical,lung, uterine,renal

SEQ ID NO: 479278 - DNA, 19 bp, Homo sapiens
  chr11:3181728-3181747
  hyper
  thyroid vs. bladder_and_urothelial,ovary,cervical,lung, uterine,renal
atgggacccacagcggcgc

SEQ ID NO: 479279 - DNA, 174 bp, Homo sapiens; identical to SEQ ID NO: 351190
  chr11:44087366-44087540
  hyper
  thyroid vs. multiple_myeloma,lung

SEQ ID NO: 479280 - DNA, 346 bp, Homo sapiens; identical to SEQ ID NO: 334256
  chr11:46867730-46868076
  hyper
  thyroid vs. liver_bileduct,multiple_myeloma

SEQ ID NO: 479281 - DNA, 22 bp, Homo sapiens
  chr11:57243645-57243667
  hyper
  thyroid vs. breast,anorectal,upper_gi
cgcggacctggccaacctgagc

SEQ ID NO: 479282 - DNA, 432 bp, Homo sapiens; identical to SEQ ID NO: 477978
  chr11:57243735-57244167
  hyper
  thyroid vs. breast,anorectal,upper_gi

SEQ ID NO: 479283 - DNA, 25 bp, Homo sapiens
  chr11:61793299-61793324
  hyper
  thyroid vs. myeloid_neoplasm
taacacaaaaccacgttttcggtcc

SEQ ID NO: 479284 - DNA, 2 bp, Homo sapiens
  chr11:66885239-66885241
  hyper
  thyroid vs. multiple_myeloma,cervical,non_cancer, anorectal,lymphoid_neoplasm
cg

SEQ ID NO: 479285 - DNA, 112 bp, Homo sapiens; identical to SEQ ID NO: 351230
  chr11:66886029-66886141
  hyper
  thyroid vs. multiple_myeloma,cervical,non_cancer, anorectal,lymphoid_neoplasm

SEQ ID NO: 479286 - DNA, 179 bp, Homo sapiens; identical to SEQ ID NO: 334308
  chr11:68080751-68080930
  hyper
  thyroid vs. sarcoma,upper_gi

SEQ ID NO: 479287 - DNA, 232 bp, Homo sapiens; identical to SEQ ID NO: 475326
  chr11:69451967-69452199
  hyper
  thyroid vs. lung

SEQ ID NO: 479288 - DNA, 369 bp, Homo sapiens; identical to SEQ ID NO: 475327
  chr11:69452289-69452658
  hyper
  thyroid vs. lung

SEQ ID NO: 479289 - DNA, 502 bp, Homo sapiens; identical to SEQ ID NO: 466254
  chr11:113345738-113346240
  hyper
  thyroid vs. ovary

SEQ ID NO: 479290 - DNA, 66 bp, Homo sapiens; identical to SEQ ID NO: 334374
  chr11:119145611-119145677
  hyper
  thyroid vs. ovary,lung,lymphoid_neoplasm

SEQ ID NO: 479291 - DNA, 1 bp, Homo sapiens
  chr11:119598945-119598946
  hyper
  thyroid vs. liver_bileduct,ovary,lung, pancreas_gallbladder
c

SEQ ID NO: 479292 - DNA, 301 bp, Homo sapiens; identical to SEQ ID NO: 359947
  chr11:119599011-119599312
  hyper
  thyroid vs. liver_bileduct,ovary,lung, pancreas_gallbladder

SEQ ID NO: 479293 - DNA, 763 bp, Homo sapiens; identical to SEQ ID NO: 334404
  chr11:128760451-128761214
  hyper
  thyroid vs. head_and_neck

SEQ ID NO: 479294 - DNA, 39 bp, Homo sapiens; identical to SEQ ID NO: 334408
  chr11:130083134-130083173
  hyper
  thyroid vs. pancreas_gallbladder,liver_bileduct

SEQ ID NO: 479295 - DNA, 407 bp, Homo sapiens
  chr12:6492947-6493354
  hyper
  thyroid vs. sarcoma,myeloid_neoplasm
cggccttgcagtccccgcgccctgccctctccatgactgcccgtcctgggcccctcgctttccagatcccgcacccagctgtcccttgcgctctctggaactccctctgctctccctgcgaggcttgtccaagggctgaccccgggcccgccgcccttccctcggctgggccagggctgtccgcagtccgctctcccgatcgggcttccgaagaagggaggaggccggttccggccccgcggccctcacgtgctttcccggccgcccctcccgccccgcatcgaggcagacaagcctgttcctcttccctgggctgcgattgcgacaggccggcctggctcccagcgctccctgtccccgccccgcggccagctcgctccactcccacttcctgagctccgccatgg

SEQ ID NO: 479296 - DNA, 34 bp, Homo sapiens
  chr12:6493416-6493450
  hyper
  thyroid vs. sarcoma,myeloid_neoplasm
tcccaggctctgggctcgggcagccgccgccacc

SEQ ID NO: 479297 - DNA, 115 bp, Homo sapiens; identical to SEQ ID NO: 360019
  chr12:6493504-6493619
  hyper
  thyroid vs. sarcoma,myeloid_neoplasm

SEQ ID NO: 479298 - DNA, 294 bp, Homo sapiens; identical to SEQ ID NO: 360027
  chr12:9216950-9217244
  hyper
  thyroid vs. pancreas_gallbladder,lung,breast,renal

SEQ ID NO: 479299 - DNA, 58 bp, Homo sapiens; identical to SEQ ID NO: 466292
  chr12:19283146-19283204
  hyper
  thyroid vs. anorectal

SEQ ID NO: 479300 - DNA, 250 bp, Homo sapiens; identical to SEQ ID NO: 466293
  chr12:19283425-19283675
  hyper
  thyroid vs. anorectal

SEQ ID NO: 479301 - DNA, 226 bp, Homo sapiens; identical to SEQ ID NO: 351327
  chr12:19283783-19284009
  hyper
  thyroid vs. anorectal

SEQ ID NO: 479302 - DNA, 16 bp, Homo sapiens
  chr12:39299102-39299118
  hyper
  thyroid vs. liver_bileduct,myeloid_neoplasm
cccactactgagatat

SEQ ID NO: 479303 - DNA, 335 bp, Homo sapiens; identical to SEQ ID NO: 468698
  chr12:46766939-46767274
  hyper
  thyroid vs. myeloid_neoplasm

SEQ ID NO: 479304 - DNA, 171 bp, Homo sapiens
  chr12:54070830-54071001
  hyper
  thyroid vs. lung
cgagaaagacgggaaaagctcaccaaaccccataaaaaataaaaaataaaaagaaagccgcggctgtaaataaaggcaaatccgccactctctgaggggccgtttgtcctcccctccttggccccgtccttcccgccgccccctcccggctcccgggccccgcggcgcccc

SEQ ID NO: 479305 - DNA, 336 bp, Homo sapiens; identical to SEQ ID NO: 334634
  chr12:104359142-104359478
  hyper
  thyroid vs. multiple_myeloma,upper_gi

SEQ ID NO: 479306 - DNA, 686 bp, Homo sapiens; identical to SEQ ID NO: 334637
  chr12:104682348-104683034
  hyper
  thyroid vs. ovary,multiple_myeloma,anorectal, lymphoid_neoplasm,pancreas_gallbladder,cervical,head_and_neck, liver_bileduct,sarcoma,myeloid_neoplasm,upper_gi,colorectal, uterine

SEQ ID NO: 479307 - DNA, 2 bp, Homo sapiens
  chr13:24477426-24477428
  hyper
  thyroid vs. pancreas_gallbladder
cg

SEQ ID NO: 479308 - DNA, 199 bp, Homo sapiens; identical to SEQ ID NO: 334756
  chr13:41364049-41364248
  hyper
  thyroid vs. lung,sarcoma,upper_gi

SEQ ID NO: 479309 - DNA, 284 bp, Homo sapiens; identical to SEQ ID NO: 334760
  chr13:44544261-44544545
  hyper
  thyroid vs. ovary,lung,pancreas_gallbladder, head_and_neck

SEQ ID NO: 479310 - DNA, 601 bp, Homo sapiens; identical to SEQ ID NO: 334802
  chr13:96705328-96705929
  hyper
  thyroid vs. sarcoma,ovary,bladder_and_urothelial, head_and_neck

SEQ ID NO: 479311 - DNA, 124 bp, Homo sapiens
  chr13:99404493-99404617
  hyper
  thyroid vs. lung,ovary
cggtgtttctgccgcccctgccgtcacccgctgggtcccgtcccgctccaagcgcactcccggcccgcagggtgggaatacgaggattacagtgccccacgggcgggcgggccaggatcgcaac

SEQ ID NO: 479312 - DNA, 13 bp, Homo sapiens
  chr13:99405089-99405102
  hyper
  thyroid vs. lung,ovary
cgcgtggcaggcc

SEQ ID NO: 479313 - DNA, 670 bp, Homo sapiens
  chr13:100623230-100623900
  hyper
  thyroid vs. ovary,multiple_myeloma
cggggccgggtgctggggggagccggtgccggaccgctgctcccctccgagcggggccccgtgcatggccgccgcgggggccgtggcggaaaggtccctccggaggacgaagtccctgctgtggcctttgccgctgctgccgccgccgccactgttggtggtggtgtagcccgagagggcaggaggaggaggaggcgggggagggggagggggtgaaggggtgggaggaagaggaggggctgggggcgggggcgcggagggctgcgcgccactgctgcccccgccgcaggggtagctgcccgcgccggggtgcgcgaccaaggctgcagcacgggcggcggctgccggagcctccgggtgtgccgggaacgcctgggagggagggctgaggcccagcgtgctcgcctgggccatgtgctcgggtccgagcggagtggtggccacgccggggtcagcgcccaggtcccgcaggcggaggtgcgcgacggcggcccggagttgggagtgggcgggcgggccggccagcgccgggaagcctgtcatattctgaagcggctggacctgagccgttgccaaatccgctaatctcagcgctggcgggttcctcttgctcaaagggggctccatcagaactacacaatcaggcccatagaccctcactggggggact

SEQ ID NO: 479314 - DNA, 77 bp, Homo sapiens; identical to SEQ ID NO: 334894
  chr14:50511831-50511908
  hyper
  thyroid vs. myeloid_neoplasm

SEQ ID NO: 479315 - DNA, 228 bp, Homo sapiens; identical to SEQ ID NO: 351555
  chr14:53417820-53418048
  hyper
  thyroid vs. ovary,lung,renal,sarcoma,cervical, liver_bileduct,breast,uterine,non_cancer,prostate, bladder_and_urothelial,myeloid_neoplasm

SEQ ID NO: 479316 - DNA, 114 bp, Homo sapiens
  chr14:58332405-58332519
  hyper
  thyroid vs. ovary,liver_bileduct,lung,uterine,renal, lymphoid_neoplasm,pancreas_gallbladder,head_and_neck,cervical
cccgcctcgcgcagggcagccgcgcggcgtcttacttttctggctggagtaacctggataatagccatagtagccggtgatccgcaggatccggtcctcgatagtggccacccc

SEQ ID NO: 479317 - DNA, 48 bp, Homo sapiens
  chr14:58332593-58332641
  hyper
  thyroid vs. ovary,liver_bileduct,lung,uterine,renal, lymphoid_neoplasm,pancreas_gallbladder,head_and_neck,cervical
cggggcccgggagctggtgcaggtgccggagccgctggtgctgatctt

SEQ ID NO: 479318 - DNA, 164 bp, Homo sapiens; identical to SEQ ID NO: 351561
  chr14:58332908-58333072
  hyper
  thyroid vs. ovary,liver_bileduct,lung,uterine,renal, lymphoid_neoplasm,pancreas_gallbladder,head_and_neck,cervical

SEQ ID NO: 479319 - DNA, 76 bp, Homo sapiens; identical to SEQ ID NO: 373462
  chr14:62161828-62161904
  hyper
  thyroid vs. lung

SEQ ID NO: 479320 - DNA, 67 bp, Homo sapiens; identical to SEQ ID NO: 351600
  chr14:89818034-89818101
  hyper
  thyroid vs. prostate

SEQ ID NO: 479321 - DNA, 76 bp, Homo sapiens; identical to SEQ ID NO: 335045
  chr14:105155749-105155825
  hyper
  thyroid vs. lung,ovary

SEQ ID NO: 479322 - DNA, 27 bp, Homo sapiens
  chr15:45404190-45404217
  hyper
  thyroid vs. myeloid_neoplasm
gtattgcgccctccccacggccagggc

SEQ ID NO: 479323 - DNA, 72 bp, Homo sapiens; identical to SEQ ID NO: 452902
  chr15:63795400-63795472
  hyper
  thyroid vs. myeloid_neoplasm,multiple_myeloma

SEQ ID NO: 479324 - DNA, 351 bp, Homo sapiens; identical to SEQ ID NO: 452903
  chr15:63795501-63795852
  hyper
  thyroid vs. myeloid_neoplasm,multiple_myeloma

SEQ ID NO: 479325 - DNA, 338 bp, Homo sapiens; identical to SEQ ID NO: 347348
  chr15:63795894-63796232
  hyper
  thyroid vs. myeloid_neoplasm,multiple_myeloma

SEQ ID NO: 479326 - DNA, 392 bp, Homo sapiens
  chr16:325107-325499
  hyper
  thyroid vs. ovary
cggggccgcggaagcgggcgagggcgggacgagccgggcctcctctcccctatgtgctccccacccttgcacagcgcgctcagcagggctctgagaactgccagactccaggaaaacccaggcctaggccaccagcccagtgaccccagggcccagtgggaggcagggcgctcaccctcctccgagacgcagaacttctgggccaaccactgcacgacgtcgctgcctgcacgggagagacagaggtggagggaggccgaggcgcgcacgcacccccgccccggcgcgcctcacctgtcaccgcgtggggaatgacggtgaccagcaggcgctggctccgcatcttcacgccctggtcggggtcctgcatgctcacgaccacccgctccatc

SEQ ID NO: 479327 - DNA, 55 bp, Homo sapiens; identical to SEQ ID NO: 373812
  chr16:325546-325601
  hyper
  thyroid vs. ovary

SEQ ID NO: 479328 - DNA, 56 bp, Homo sapiens; identical to SEQ ID NO: 335300
  chr16:21964488-21964544
  hyper
  thyroid vs. lung,ovary,multiple_myeloma, lymphoid_neoplasm,upper_gi,pancreas_gallbladder,liver_bileduct, head_and_neck

SEQ ID NO: 479329 - DNA, 8 bp, Homo sapiens
  chr16:68504020-68504028
  hyper
  thyroid vs. myeloid_neoplasm,anorectal,non_cancer, multiple_myeloma,prostate,melanoma,breast,head_and_neck
cgttctgt

SEQ ID NO: 479330 - DNA, 102 bp, Homo sapiens; identical to SEQ ID NO: 345496
  chr16:68504292-68504394
  hyper
  thyroid vs. myeloid_neoplasm,anorectal,non_cancer, multiple_myeloma,prostate,melanoma,breast,head_and_neck

SEQ ID NO: 479331 - DNA, 4 bp, Homo sapiens
  chr16:86532210-86532214
  hyper
  thyroid vs. lung,ovary
cggc

SEQ ID NO: 479332 - DNA, 562 bp, Homo sapiens; identical to SEQ ID NO: 127698
  chr16:86532408-86532970
  hyper
  thyroid vs. lung,ovary

SEQ ID NO: 479333 - DNA, 307 bp, Homo sapiens; identical to SEQ ID NO: 335424
  chr17:523549-523856
  hyper
  thyroid vs. sarcoma,colorectal,upper_gi,multiple_myeloma, bladder_and_urothelial,non_cancer,anorectal,melanoma,prostate, uterine

SEQ ID NO: 479334 - DNA, 487 bp, Homo sapiens
  chr17:576348-576835
  hyper
  thyroid vs. liver_bileduct,melanoma, bladder_and_urothelial,cervical,anorectal,head_and_neck, colorectal,upper_gi,uterine,prostate
cgcaaaaaaaaaacaaaaacaaaaacaaaaaaaaaacaacggcagcatcatttcgaaagccaggaggtcctccagagagcagaaacatggatgagtgctaccacatctgataagccctacacggaagccctcaccacatccactgagggtggacaccaagggtcaagtcgcctctctttagagaaagtctcttcttttgttactgctgaccaccccggcatcactgagagctgttgctatggaaacgaggtatccccagctgaaacagaggtgcttcagccagcctcagcaatgctaacaatgcagcccgctctccacgacggtgctcaacagcagcagaggctgcgggactctcacacacccagcctcagcaatgccaacaacgcagcccactccccatgatggtgctcaacagcagcagaggctgtcggactctcacagccacagatggctgcacgtctacagctctttgcttccctacgtgtcc

SEQ ID NO: 479335 - DNA, 56 bp, Homo sapiens
  chr17:17287170-17287226
  hyper
  thyroid vs. sarcoma
cgacgcggggcgcggggcgatgcggcgcgccttggcttgccgggccttacgtctgc

SEQ ID NO: 479336 - DNA, 14 bp, Homo sapiens
  chr17:17287254-17287268
  hyper
  thyroid vs. sarcoma
cgtggccacgcgcc

SEQ ID NO: 479337 - DNA, 410 bp, Homo sapiens; identical to SEQ ID NO: 335482
  chr17:19282076-19282486
  hyper
  thyroid vs. ovary,anorectal

SEQ ID NO: 479338 - DNA, 2 bp, Homo sapiens
  chr17:36105728-36105730
  hyper
  thyroid vs. non_cancer,multiple_myeloma
cc

SEQ ID NO: 479339 - DNA, 90 bp, Homo sapiens; identical to SEQ ID NO: 351930
  chr17:37183607-37183697
  hyper
  thyroid vs. ovary,liver_bileduct,upper_gi,lung, colorectal,bladder_and_urothelial,sarcoma,cervical, head_and_neck,breast,anorectal

SEQ ID NO: 479340 - DNA, 841 bp, Homo sapiens; identical to SEQ ID NO: 335546
  chr17:41245464-41246305
  hyper
  thyroid vs. ovary,liver_bileduct,lung

SEQ ID NO: 479341 - DNA, 848 bp, Homo sapiens; identical to SEQ ID NO: 335648
  chr17:63555681-63556529
  hyper
  thyroid vs. ovary,uterine,sarcoma,upper_gi

SEQ ID NO: 479342 - DNA, 675 bp, Homo sapiens; identical to SEQ ID NO: 352002
  chr17:64298985-64299660
  hyper
  thyroid vs. liver_bileduct

SEQ ID NO: 479343 - DNA, 360 bp, Homo sapiens; identical to SEQ ID NO: 335694
  chr17:76588327-76588687
  hyper
  thyroid vs. myeloid_neoplasm,colorectal,melanoma, anorectal,multiple_myeloma,non_cancer,breast,renal, bladder_and_urothelial

SEQ ID NO: 479344 - DNA, 118 bp, Homo sapiens
  chr18:907197-907315
  hyper
  thyroid vs. ovary,sarcoma,uterine
cgcacgccccacgcatcctctcctttgctttctgggcctccccattcgggtcttcgcgtgggtcagcgcccggtctcccagggcctttctcgtccccgcccgttgctgctttggggag

SEQ ID NO: 479345 - DNA, 995 bp, Homo sapiens; identical to SEQ ID NO: 335733
  chr18:3879130-3880125
  hyper
  thyroid vs. anorectal

SEQ ID NO: 479346 - DNA, 213 bp, Homo sapiens
  chr18:12253892-12254105
  hyper
aaccagcggctcgctgagcctggggctgggctctgggggactccagagctggaggcaagtggcgctcacatccgtctcctcacctgccccacccgtggcctgggtttaaaatccacatacccgtctttccgcggccaaagtgatgctgccaggattggttatgaccccaactgccccgacccccagaagtgcaaaacgaacaggctggcaagt

SEQ ID NO: 479347 - DNA, 3 bp, Homo sapiens
  chr18:12254630-12254633
  hyper
ccc

SEQ ID NO: 479348 - DNA, 238 bp, Homo sapiens; identical to SEQ ID NO: 466725
  chr18:45534410-45534648
  hyper
  thyroid vs. ovary

SEQ ID NO: 479349 - DNA, 261 bp, Homo sapiens; identical to SEQ ID NO: 466726
  chr18:45534675-45534936
  hyper
  thyroid vs. ovary

SEQ ID NO: 479350 - DNA, 41 bp, Homo sapiens; identical to SEQ ID NO: 361264
  chr18:45534976-45535017
  hyper
  thyroid vs. ovary

SEQ ID NO: 479351 - DNA, 354 bp, Homo sapiens; identical to SEQ ID NO: 466749
  chr18:52495540-52495894
  hyper
  thyroid vs. bladder_and_urothelial,ovary,anorectal, colorectal

SEQ ID NO: 479352 - DNA, 50 bp, Homo sapiens; identical to SEQ ID NO: 361286
  chr18:52496020-52496070
  hyper
  thyroid vs. bladder_and_urothelial,ovary,anorectal, colorectal

SEQ ID NO: 479353 - DNA, 138 bp, Homo sapiens; identical to SEQ ID NO: 452971
  chr18:70210281-70210419
  hyper
  thyroid vs. melanoma

SEQ ID NO: 479354 - DNA, 53 bp, Homo sapiens; identical to SEQ ID NO: 452972
  chr18:70210508-70210561
  hyper
  thyroid vs. melanoma

SEQ ID NO: 479355 - DNA, 307 bp, Homo sapiens; identical to SEQ ID NO: 473912
  chr19:1775741-1776048
  hyper
  thyroid vs. multiple_myeloma,lung,uterine,anorectal, melanoma,colorectal,ovary,breast

SEQ ID NO: 479356 - DNA, 224 bp, Homo sapiens; identical to SEQ ID NO: 473913
  chr19:1776743-1776967
  hyper
  thyroid vs. multiple_myeloma,lung,uterine,melanoma, liver_bileduct,breast,ovary,renal,non_cancer,colorectal

SEQ ID NO: 479357 - DNA, 341 bp, Homo sapiens; identical to SEQ ID NO: 335893
  chr19:1874698-1875039
  hyper
  thyroid vs. myeloid_neoplasm,upper_gi

SEQ ID NO: 479358 - DNA, 174 bp, Homo sapiens; identical to SEQ ID NO: 361372
  chr19:2236297-2236471
  hyper
  thyroid vs. lung,multiple_myeloma

SEQ ID NO: 479359 - DNA, 234 bp, Homo sapiens; identical to SEQ ID NO: 466807
  chr19:31841177-31841411
  hyper
  thyroid vs. ovary

SEQ ID NO: 479360 - DNA, 156 bp, Homo sapiens; identical to SEQ ID NO: 352290
  chr19:37329462-37329618
  hyper
  thyroid vs. ovary

SEQ ID NO: 479361 - DNA, 46 bp, Homo sapiens
  chr19:38145965-38146011
  hyper
  thyroid vs. lung,liver_bileduct,uterine,ovary, head_and_neck
cgttttgcaggggaccttcatcctggggcgttcacctctgacttcc

SEQ ID NO: 479362 - DNA, 804 bp, Homo sapiens
  chr19:45647694-45648498
  hyper
  thyroid vs. bladder_and_urothelial,sarcoma,renal, lymphoid_neoplasm,upper_gi,anorectal,liver_bileduct, head_and_neck,colorectal
cgtgcctggttttcagtttttatgtggtgcttaaagcaagccactcaggtacagagactctcagggcgagcactcgtgtgctcaaaccccgggataagagttgccctccttgggggcttcagggcgctcaaggtccaggccctggccaggggcccaggctgtggggggtagggactgactgggtgcctggggagctgggagtggacgggggacctggcatttggggagacttcaggcacaggagggacttcaggccaggcctgcggcagggcaggacggcgccggtgttcacgcaggcgcgcgaaagaaaaggagcgcccgggcctggctctcttcccggcttctttcctgacttggcctcctgggtctcctccgccatcacggcctcctcctcaccctcacaccccctccctccagccgcacactcagagcctggagacgctgaacctgggccacaaccccatcgggaacgagggtgtgcggcacctcaagaacgggctcatcagcaaccgcagcgtgctgcgcctcgggctggcctccaccaagctcacgtgcgagggtagggtacggggccgggccagggtgcgggctggtgggctcagccgggcggccagccgggtgtggggcccgtggccagcccctgcggtgcccccccaggcgcggtggcggtggcggagttcatcgctgagagcccccgcctcctgagactggaccttcgggagaacgagatcaagacaggcgggctcatggcactgtcgttggccctcaaggtgaaccactcactgctgcgcctggacctcgacc

SEQ ID NO: 479363 - DNA, 802 bp, Homo sapiens; identical to SEQ ID NO: 347608
  chr19:45648009-45648811
  hyper
  thyroid vs. pancreas_gallbladder,bladder_and_urothelial, cervical,head_and_neck,anorectal,uterine,renal,upper_gi,ovary, lymphoid_neoplasm,sarcoma,multiple_myeloma,non_cancer,prostate, colorectal,breast,melanoma,liver_bileduct,myeloid_neoplasm

SEQ ID NO: 479364 - DNA, 68 bp, Homo sapiens; identical to SEQ ID NO: 336186
  chr19:47040909-47040977
  hyper
  thyroid vs. bladder_and_urothelial,anorectal,melanoma, uterine

SEQ ID NO: 479365 - DNA, 83 bp, Homo sapiens; identical to SEQ ID NO: 336190
  chr19:47676020-47676103
  hyper
  thyroid vs. liver_bileduct

SEQ ID NO: 479366 - DNA, 378 bp, Homo sapiens; identical to SEQ ID NO: 336220
  chr19:50708476-50708854
  hyper
  thyroid vs. liver_bileduct

SEQ ID NO: 479367 - DNA, 180 bp, Homo sapiens
  chr19:52956933-52957113
  hyper
  thyroid vs. lung,ovary,multiple_myeloma
ggatcttaaaatcctcccgccgttccctccatcctaggtatattaatacgtcgccaagaaattcggaggttaaaatcgcttggaggctgctggtcctttccctgagctctctgccttcgggccacgtagacgcttttcgtcccgtttacctgcttaaaaccctttactgaccactccttc

SEQ ID NO: 479368 - DNA, 264 bp, Homo sapiens; identical to SEQ ID NO: 453042
  chr19:53104083-53104347
  hyper
  thyroid vs. ovary

SEQ ID NO: 479369 - DNA, 74 bp, Homo sapiens; identical to SEQ ID NO: 369482
  chr2:5834133-5834207
  hyper

SEQ ID NO: 479370 - DNA, 243 bp, Homo sapiens; identical to SEQ ID NO: 357127
  chr2:24714924-24715167
  hyper
  thyroid vs. ovary

SEQ ID NO: 479371 - DNA, 199 bp, Homo sapiens; identical to SEQ ID NO: 331262
  chr2:39663585-39663784
  hyper
  thyroid vs. sarcoma

SEQ ID NO: 479372 - DNA, 537 bp, Homo sapiens; identical to SEQ ID NO: 331290
  chr2:47142873-47143410
  hyper
  thyroid vs. lung,ovary,multiple_myeloma, lymphoid_neoplasm,pancreas_gallbladder,liver_bileduct, head_and_neck

SEQ ID NO: 479373 - DNA, 203 bp, Homo sapiens; identical to SEQ ID NO: 369604
  chr2:62081268-62081471
  hyper
  thyroid vs. lung

SEQ ID NO: 479374 - DNA, 77 bp, Homo sapiens; identical to SEQ ID NO: 459577
  chr2:66652787-66652864
  hyper

SEQ ID NO: 479375 - DNA, 60 bp, Homo sapiens; identical to SEQ ID NO: 459578
  chr2:66652963-66653023
  hyper

SEQ ID NO: 479376 - DNA, 155 bp, Homo sapiens; identical to SEQ ID NO: 357300
  chr2:128284482-128284637
  hyper
  thyroid vs. lung

SEQ ID NO: 479377 - DNA, 353 bp, Homo sapiens; identical to SEQ ID NO: 331547
  chr2:178483339-178483692
  hyper
  thyroid vs. lung,liver_bileduct

SEQ ID NO: 479378 - DNA, 193 bp, Homo sapiens; identical to SEQ ID NO: 349646
  chr2:182756176-182756369
  hyper
  thyroid vs. multiple_myeloma,lung,uterine,liver_bileduct

SEQ ID NO: 479379 - DNA, 372 bp, Homo sapiens; identical to SEQ ID NO: 331638
  chr2:224808923-224809295
  hyper
  thyroid vs. ovary,pancreas_gallbladder

SEQ ID NO: 479380 - DNA, 121 bp, Homo sapiens; identical to SEQ ID NO: 453152
  chr20:2731109-2731230
  hyper
  thyroid vs. non_cancer,colorectal,multiple_myeloma,renal, upper_gi,breast,myeloid_neoplasm,cervical

SEQ ID NO: 479381 - DNA, 226 bp, Homo sapiens; identical to SEQ ID NO: 453153
  chr20:2731391-2731617
  hyper
  thyroid vs. non_cancer,colorectal,multiple_myeloma,renal, upper_gi,breast,myeloid_neoplasm,cervical

SEQ ID NO: 479382 - DNA, 331 bp, Homo sapiens; identical to SEQ ID NO: 453154
  chr20:2731675-2732006
  hyper
  thyroid vs. non_cancer,colorectal,multiple_myeloma,renal, upper_gi,breast,myeloid_neoplasm,cervical

SEQ ID NO: 479383 - DNA, 89 bp, Homo sapiens; identical to SEQ ID NO: 478420
  chr20:2731528-2731617
  hyper
  thyroid vs. colorectal,myeloid_neoplasm,non_cancer, upper_gi,pancreas_gallbladder,cervical,multiple_myeloma,breast, renal,uterine,lung,bladder_and_urothelial,prostate,anorectal

SEQ ID NO: 479384 - DNA, 744 bp, Homo sapiens; identical to SEQ ID NO: 345622
  chr20:2731675-2732419
  hyper
  thyroid vs. colorectal,myeloid_neoplasm,non_cancer, upper_gi,pancreas_gallbladder,cervical,multiple_myeloma,breast, renal,uterine,lung,bladder_and_urothelial,prostate,anorectal

SEQ ID NO: 479385 - DNA, 57 bp, Homo sapiens; identical to SEQ ID NO: 336444
  chr20:43374349-43374406
  hyper
  thyroid vs. multiple_myeloma,anorectal

SEQ ID NO: 479386 - DNA, 161 bp, Homo sapiens; identical to SEQ ID NO: 467123
  chr20:55203944-55204105
  hyper
  thyroid vs. ovary,bladder_and_urothelial

SEQ ID NO: 479387 - DNA, 305 bp, Homo sapiens; identical to SEQ ID NO: 375164
  chr20:57415535-57415840
  hyper
  thyroid vs. liver_bileduct

SEQ ID NO: 479388 - DNA, 144 bp, Homo sapiens; identical to SEQ ID NO: 336520
  chr20:62371942-62372086
  hyper
  thyroid vs. lung,myeloid_neoplasm,pancreas_gallbladder, head_and_neck,ovary,upper_gi,sarcoma,renal

SEQ ID NO: 479389 - DNA, 16 bp, Homo sapiens
  chr21:22369907-22369923
  hyper
  thyroid vs. lung,multiple_myeloma,head_and_neck,uterine, upper_gi,breast,myeloid_neoplasm,sarcoma
cgtaaggtgccgctcc

SEQ ID NO: 479390 - DNA, 67 bp, Homo sapiens; identical to SEQ ID NO: 352537
  chr21:22370943-22371010
  hyper
  thyroid vs. lung,ovary,multiple_myeloma,head_and_neck

SEQ ID NO: 479391 - DNA, 93 bp, Homo sapiens; identical to SEQ ID NO: 336576
  chr21:43430373-43430466
  hyper
  thyroid vs. lung,ovary,lymphoid_neoplasm, multiple_myeloma,upper_gi,pancreas_gallbladder

SEQ ID NO: 479392 - DNA, 730 bp, Homo sapiens; identical to SEQ ID NO: 352590
  chr22:25959837-25960567
  hyper
  thyroid vs. multiple_myeloma,myeloid_neoplasm, lymphoid_neoplasm

SEQ ID NO: 479393 - DNA, 172 bp, Homo sapiens; identical to SEQ ID NO: 336652
  chr22:41593094-41593266
  hyper
  thyroid vs. sarcoma

SEQ ID NO: 479394 - DNA, 1 bp, Homo sapiens
  chr22:42679388-42679389
  hyper
  thyroid vs. ovary
c

SEQ ID NO: 479395 - DNA, 6 bp, Homo sapiens
  chr22:43659511-43659517
  hyper
  thyroid vs. myeloid_neoplasm,anorectal, bladder_and_urothelial
cggctc

SEQ ID NO: 479396 - DNA, 470 bp, Homo sapiens; identical to SEQ ID NO: 352620
  chr22:43659642-43660112
  hyper
  thyroid vs. myeloid_neoplasm,anorectal, bladder_and_urothelial

SEQ ID NO: 479397 - DNA, 237 bp, Homo sapiens; identical to SEQ ID NO: 375373
  chr22:51112317-51112554
  hyper
  thyroid vs. myeloid_neoplasm

SEQ ID NO: 479398 - DNA, 327 bp, Homo sapiens
  chr3:4909962-4910289
  hyper
  thyroid vs. renal,anorectal,cervical,non_cancer
cgcggcctttgaggggaaagggccagggcctagacgttcccctcccgcgtggttttcccgtcagcagctttcgtctgcaagggaaagcggcggccccacccgcagacagctgcgaggcaccgcgccaagcgtatgcgcctgttcccaggcactccctcctccgccttcacccttttgccacctccgccctccacccagccccgccgtgcgcctgcgcgccccggcccgtgggccagcgggcagtctactcacgtgggcctccgcatggcccagcgccgccaagggcaaggcggagcctcgcgatcgccccgccccctccgtgccccg

SEQ ID NO: 479399 - DNA, 210 bp, Homo sapiens; identical to SEQ ID NO: 349726
  chr3:4910550-4910760
  hyper
  thyroid vs. renal,anorectal,cervical,non_cancer

SEQ ID NO: 479400 - DNA, 427 bp, Homo sapiens; identical to SEQ ID NO: 469116
  chr3:44038922-44039349
  hyper
  thyroid vs. myeloid_neoplasm

SEQ ID NO: 479401 - DNA, 156 bp, Homo sapiens; identical to SEQ ID NO: 469117
  chr3:44039193-44039349
  hyper
  thyroid vs. myeloid_neoplasm

SEQ ID NO: 479402 - DNA, 42 bp, Homo sapiens; identical to SEQ ID NO: 464518
  chr3:44063232-44063274
  hyper
  thyroid vs. myeloid_neoplasm

SEQ ID NO: 479403 - DNA, 387 bp, Homo sapiens; identical to SEQ ID NO: 357604
  chr3:49893744-49894131
  hyper
  thyroid vs. ovary,myeloid_neoplasm

SEQ ID NO: 479404 - DNA, 349 bp, Homo sapiens
  chr3:64671307-64671656
  hyper
  thyroid vs. liver_bileduct,lung
cgggggtcgacagagagtcggggaaccaacgtggattccctgctaaatgctatttggcagcgcaagaaggcggcctccccgccctgcctcagtccctagggaaacgtgcgccgcaggctccctctctccactccctggaacccgtgagtagtagaaaccccagaggaaccgaaatcacgtccggacagcctctccaggctgtctcccactatcccgtttctcccggccaccccgccagtagggtgcagagttggactgcgctgcacccccactctcggttccaccccaattcaaagcgtccggggtaggctccgccttctcccccgcccccagagccctcggcccaccc

SEQ ID NO: 479405 - DNA, 307 bp, Homo sapiens; identical to SEQ ID NO: 467215
  chr3:64671732-64672039
  hyper
  thyroid vs. liver_bileduct,lung

SEQ ID NO: 479406 - DNA, 475 bp, Homo sapiens; identical to SEQ ID NO: 455984
  chr3:131080684-131081159
  hyper
  thyroid vs. ovary,upper_gi

SEQ ID NO: 479407 - DNA, 352 bp, Homo sapiens; identical to SEQ ID NO: 357789
  chr3:193852659-193853011
  hyper
  thyroid vs. myeloid_neoplasm,anorectal,multiple_myeloma, melanoma,lung

SEQ ID NO: 479408 - DNA, 583 bp, Homo sapiens; identical to SEQ ID NO: 472571
  chr3:195599104-195599687
  hyper
  thyroid vs. non_cancer,prostate,multiple_myeloma,breast, uterine,melanoma,myeloid_neoplasm,bladder_and_urothelial, cervical,lymphoid_neoplasm,renal,sarcoma,colorectal

SEQ ID NO: 479409 - DNA, 174 bp, Homo sapiens; identical to SEQ ID NO: 472572
  chr3:195599513-195599687
  hyper
  thyroid vs. melanoma,prostate,non_cancer, multiple_myeloma,uterine,breast,myeloid_neoplasm,renal, colorectal,bladder_and_urothelial,sarcoma,lymphoid_neoplasm

SEQ ID NO: 479410 - DNA, 127 bp, Homo sapiens; identical to SEQ ID NO: 357829
  chr4:6717788-6717915
  hyper
  thyroid vs. lung,ovary,lymphoid_neoplasm

SEQ ID NO: 479411 - DNA, 24 bp, Homo sapiens
  chr4:87813027-87813051
  hyper
  thyroid vs. ovary,lung,sarcoma,anorectal,liver_bileduct
cgctgcgccaaaatgtgtctgatc

SEQ ID NO: 479412 - DNA, 341 bp, Homo sapiens; identical to SEQ ID NO: 467346
  chr4:87813080-87813421
  hyper
  thyroid vs. ovary,lung,sarcoma,anorectal,liver_bileduct

SEQ ID NO: 479413 - DNA, 313 bp, Homo sapiens; identical to SEQ ID NO: 349949
  chr4:87813512-87813825
  hyper
  thyroid vs. ovary,lung,sarcoma,anorectal,liver_bileduct

SEQ ID NO: 479414 - DNA, 137 bp, Homo sapiens; identical to SEQ ID NO: 469201
  chr4:140970253-140970390
  hyper
  thyroid vs. myeloid_neoplasm,colorectal

SEQ ID NO: 479415 - DNA, 212 bp, Homo sapiens; identical to SEQ ID NO: 349979
  chr4:140970419-140970631
  hyper
  thyroid vs. myeloid_neoplasm,colorectal

SEQ ID NO: 479416 - DNA, 194 bp, Homo sapiens; identical to SEQ ID NO: 332204
  chr4:146098925-146099119
  hyper
  thyroid vs. myeloid_neoplasm,lymphoid_neoplasm, multiple_myeloma,melanoma,upper_gi,pancreas_gallbladder,renal, colorectal,non_cancer,breast

SEQ ID NO: 479417 - DNA, 227 bp, Homo sapiens; identical to SEQ ID NO: 370585
  chr4:154387493-154387720
  hyper
  thyroid vs. head_and_neck

SEQ ID NO: 479418 - DNA, 468 bp, Homo sapiens; identical to SEQ ID NO: 332309
  chr5:10354870-10355338
  hyper
  thyroid vs. lung

SEQ ID NO: 479419 - DNA, 125 bp, Homo sapiens; identical to SEQ ID NO: 332315
  chr5:14205146-14205271
  hyper
  thyroid vs. myeloid_neoplasm,multiple_myeloma,renal, colorectal,liver_bileduct,uterine,prostate

SEQ ID NO: 479420 - DNA, 76 bp, Homo sapiens; identical to SEQ ID NO: 454408
  chr5:54518558-54518634
  hyper
  thyroid vs. myeloid_neoplasm

SEQ ID NO: 479421 - DNA, 752 bp, Homo sapiens; identical to SEQ ID NO: 453293
  chr5:75698708-75699460
  hyper
  thyroid vs. myeloid_neoplasm,cervical

SEQ ID NO: 479422 - DNA, 423 bp, Homo sapiens; identical to SEQ ID NO: 453309
  chr5:88179429-88179852
  hyper
  thyroid vs. multiple_myeloma

SEQ ID NO: 479423 - DNA, 253 bp, Homo sapiens; identical to SEQ ID NO: 467468
  chr5:112823814-112824067
  hyper
  thyroid vs. ovary,lung,uterine

SEQ ID NO: 479424 - DNA, 3 bp, Homo sapiens
  chr5:121649039-121649042
  hyper
  thyroid vs. sarcoma,multiple_myeloma,prostate,uterine, non_cancer
gcc

SEQ ID NO: 479425 - DNA, 362 bp, Homo sapiens; identical to SEQ ID NO: 370856
  chr5:131892939-131893301
  hyper
  thyroid vs. bladder_and_urothelial

SEQ ID NO: 479426 - DNA, 94 bp, Homo sapiens; identical to SEQ ID NO: 332487
  chr5:134240165-134240259
  hyper
  thyroid vs. lung

SEQ ID NO: 479427 - DNA, 625 bp, Homo sapiens; identical to SEQ ID NO: 456042
  chr5:142781875-142782500
  hyper
  thyroid vs. multiple_myeloma,myeloid_neoplasm

SEQ ID NO: 479428 - DNA, 78 bp, Homo sapiens; identical to SEQ ID NO: 456043
  chr5:142782625-142782703
  hyper
  thyroid vs. multiple_myeloma,myeloid_neoplasm

SEQ ID NO: 479429 - DNA, 93 bp, Homo sapiens; identical to SEQ ID NO: 358336
  chr5:177543589-177543682
  hyper
  thyroid vs. myeloid_neoplasm

SEQ ID NO: 479430 - DNA, 140 bp, Homo sapiens; identical to SEQ ID NO: 453366
  chr6:27059547-27059687
  hyper
  thyroid vs. myeloid_neoplasm

SEQ ID NO: 479431 - DNA, 43 bp, Homo sapiens; identical to SEQ ID NO: 350322
  chr6:27059899-27059942
  hyper
  thyroid vs. myeloid_neoplasm

SEQ ID NO: 479432 - DNA, 220 bp, Homo sapiens
  chr6:27300812-27301032
  hyper
  thyroid vs. multiple_myeloma
cgcttccgctgcgccactctgctaagcggtttctgaagaccactgatcttaatttcaatcatcaaaatcacctttcagtaccgacaaaattttcattgtctaattatttcattttgtatctgatcgtttacactgtccctatctctgccaagcaagtcgaagattcgctacccgataatcagatggcctcaggtcataacctccagatctgtgcttttcc

SEQ ID NO: 479433 - DNA, 99 bp, Homo sapiens; identical to SEQ ID NO: 332801
  chr6:47382546-47382645
  hyper
  thyroid vs. multiple_myeloma,lymphoid_neoplasm, bladder_and_urothelial,myeloid_neoplasm,colorectal,renal, prostate,pancreas_gallbladder,uterine,upper_gi,non_cancer, cervical,breast

SEQ ID NO: 479434 - DNA, 164 bp, Homo sapiens; identical to SEQ ID NO: 456082
  chr6:73329621-73329785
  hyper
  thyroid vs. myeloid_neoplasm

SEQ ID NO: 479435 - DNA, 82 bp, Homo sapiens; identical to SEQ ID NO: 346833
  chr6:73330126-73330208
  hyper
  thyroid vs. myeloid_neoplasm

SEQ ID NO: 479436 - DNA, 120 bp, Homo sapiens; identical to SEQ ID NO: 332939
  chr6:138132663-138132783
  hyper
  thyroid vs. upper_gi,lymphoid_neoplasm,uterine,renal, breast,multiple_myeloma,melanoma,non_cancer

SEQ ID NO: 479437 - DNA, 42 bp, Homo sapiens; identical to SEQ ID NO: 332956
  chr6:150962790-150962832
  hyper
  thyroid vs. myeloid_neoplasm,melanoma,multiple_myeloma, cervical,non_cancer,colorectal,lymphoid_neoplasm,breast

SEQ ID NO: 479438 - DNA, 182 bp, Homo sapiens; identical to SEQ ID NO: 464739
  chr6:152622733-152622915
  hyper
  thyroid vs. lymphoid_neoplasm,myeloid_neoplasm,uterine, bladder_and_urothelial,non_cancer,breast,prostate,sarcoma, liver_bileduct

SEQ ID NO: 479439 - DNA, 16 bp, Homo sapiens
  chr6:152623493-152623509
  hyper
  thyroid vs. lymphoid_neoplasm,myeloid_neoplasm,uterine, bladder_and_urothelial,non_cancer,breast,prostate,sarcoma, liver_bileduct
ggaatcatgaacttcc

SEQ ID NO: 479440 - DNA, 224 bp, Homo sapiens; identical to SEQ ID NO: 467607
  chr7:192753-192977
  hyper
  thyroid vs. liver_bileduct

SEQ ID NO: 479441 - DNA, 512 bp, Homo sapiens; identical to SEQ ID NO: 467608
  chr7:193101-193613
  hyper
  thyroid vs. liver_bileduct

SEQ ID NO: 479442 - DNA, 34 bp, Homo sapiens; identical to SEQ ID NO: 358711
  chr7:193708-193742
  hyper
  thyroid vs. liver_bileduct

SEQ ID NO: 479443 - DNA, 43 bp, Homo sapiens
  chr7:852797-852840
  hyper
  thyroid vs. myeloid_neoplasm
gaaagggatttacgggaggtggaggttgcagtgagccaagatc

SEQ ID NO: 479444 - DNA, 141 bp, Homo sapiens; identical to SEQ ID NO: 456108
  chr7:22893437-22893578
  hyper
  thyroid vs. multiple_myeloma

SEQ ID NO: 479445 - DNA, 700 bp, Homo sapiens; identical to SEQ ID NO: 456109
  chr7:22893607-22894307
  hyper
  thyroid vs. multiple_myeloma

SEQ ID NO: 479446 - DNA, 122 bp, Homo sapiens; identical to SEQ ID NO: 454478
  chr7:23507981-23508103
  hyper
  thyroid vs. ovary,multiple_myeloma

SEQ ID NO: 479447 - DNA, 338 bp, Homo sapiens; identical to SEQ ID NO: 333071
  chr7:25894678-25895016
  hyper
  thyroid vs. lung,ovary,pancreas_gallbladder, liver_bileduct,upper_gi,head_and_neck

SEQ ID NO: 479448 - DNA, 470 bp, Homo sapiens; identical to SEQ ID NO: 469421
  chr7:65509043-65509513
  hyper
  thyroid vs. ovary

SEQ ID NO: 479449 - DNA, 51 bp, Homo sapiens; identical to SEQ ID NO: 358861
  chr7:65509542-65509593
  hyper
  thyroid vs. ovary

SEQ ID NO: 479450 - DNA, 237 bp, Homo sapiens
  chr7:80548021-80548258
  hyper
  thyroid vs. lung,uterine,ovary,anorectal
cgcgtgtgttcttaagaaaatgtccaggcttgagcataccaatgtatgaaaaatcaatatacaggccaaaaaagttatactttgctaaatctgtaatgcggaaaatgaccaatttagcttaccgaggttgaaagaaatcagcacggaaaagtcatcagtttgctaccggggttggatgcgcttgtgtctccagtccttttcccagacgaccttattttctagcacgtcgcaaaggtg

SEQ ID NO: 479451 - DNA, 446 bp, Homo sapiens; identical to SEQ ID NO: 358879
  chr7:80548403-80548849
  hyper
  thyroid vs. lung,uterine,ovary,anorectal

SEQ ID NO: 479452 - DNA, 206 bp, Homo sapiens; identical to SEQ ID NO: 371658
  chr7:111844265-111844471
  hyper
  thyroid vs. non_cancer

SEQ ID NO: 479453 - DNA, 209 bp, Homo sapiens; identical to SEQ ID NO: 474368
  chr7:127671450-127671659
  hyper
  thyroid vs. lung

SEQ ID NO: 479454 - DNA, 74 bp, Homo sapiens
  chr7:134832843-134832917
  hyper
  thyroid vs. multiple_myeloma,bladder_and_urothelial, colorectal,renal,non_cancer,lymphoid_neoplasm, pancreas_gallbladder
cgactgcgaaggcaagggggcaccagctcaggactgcatctgcctgccatttcccttccactcctcctttctgg

SEQ ID NO: 479455 - DNA, 113 bp, Homo sapiens
  chr7:150714968-150715081
  hyper
  thyroid vs. anorectal,myeloid_neoplasm
cgtggcgcttcacatccataagggcaaaggaacagatgtccccaaccccagccacatccacagtgaagtgatgaaaaaagtcgataatctccagggcacgagggcggaaccag

SEQ ID NO: 479456 - DNA, 296 bp, Homo sapiens
  chr7:150715323-150715619
  hyper
  thyroid vs. anorectal,myeloid_neoplasm
tccgcgcagacagaccccacaacttcctcctcagcccgccgtcgcgcccaccctcaccgctcggtactgcagcagctgcgccatctgccggtaggcgcggtccctgccgccggggccgggctcctccgggaggtagtgcatgtgggccagggctgtctgcagcaggagctgcggcgcacgaccctggcactgctcttccggaatgaaagacctgaaaggcgggatccgtggggggaaggggcctgcgattaggaggacgcgcggtgggatgtagggctagagggccccagtggtgg

SEQ ID NO: 479457 - DNA, 106 bp, Homo sapiens; identical to SEQ ID NO: 350705
  chr8:8639980-8640086
  hyper
  thyroid vs. lung,ovary,lymphoid_neoplasm,upper_gi

SEQ ID NO: 479458 - DNA, 20 bp, Homo sapiens
  chr8:23020932-23020952
  hyper
  thyroid vs. myeloid_neoplasm,colorectal,multiple_myeloma, cervical
cgaacgaacgaacgaacgaa

SEQ ID NO: 479459 - DNA, 25 bp, Homo sapiens
  chr8:23021107-23021132
  hyper
  thyroid vs. myeloid_neoplasm,colorectal,multiple_myeloma, cervical
cggcccggtcgctcctgcccagccc

SEQ ID NO: 479460 - DNA, 127 bp, Homo sapiens; identical to SEQ ID NO: 345299
  chr8:23021590-23021717
  hyper
  thyroid vs. myeloid_neoplasm,colorectal,multiple_myeloma, cervical

SEQ ID NO: 479461 - DNA, 135 bp, Homo sapiens
  chr8:37595183-37595318
  hyper
  thyroid vs. myeloid_neoplasm,lymphoid_neoplasm, multiple_myeloma
cggctgtatccggagccagtgcttcctcagtgcggtgggggctctaattttacagttaaagaaaggggaacgttgactgagaacgaggaggaagcgagttgtagatctagccttgtgttcacacgacaccaggct

SEQ ID NO: 479462 - DNA, 16 bp, Homo sapiens
  chr8:37595347-37595363
  hyper
  thyroid vs. myeloid_neoplasm,lymphoid_neoplasm, multiple_myeloma
ttggtgaggtcctctc

SEQ ID NO: 479463 - DNA, 335 bp, Homo sapiens; identical to SEQ ID NO: 117170
  chr8:125985496-125985831
  hyper
  thyroid vs. uterine

SEQ ID NO: 479464 - DNA, 104 bp, Homo sapiens; identical to SEQ ID NO: 333591
  chr8:144417159-144417263
  hyper
  thyroid vs. ovary,upper_gi,pancreas_gallbladder, liver_bileduct,uterine,colorectal,lymphoid_neoplasm,renal, bladder_and_urothelial,lung,head_and_neck,sarcoma

SEQ ID NO: 479465 - DNA, 2 bp, Homo sapiens
  chr9:8858690-8858692
  hyper
  thyroid vs. cervical,anorectal,colorectal
cc

SEQ ID NO: 479466 - DNA, 76 bp, Homo sapiens
  chr9:23849766-23849842
  hyper
  thyroid vs. ovary
cgggtttctttttgttgttgtttaacgaccccctcctcccagcccccaaccctttgtgtgtgaggattccccttca

SEQ ID NO: 479467 - DNA, 209 bp, Homo sapiens; identical to SEQ ID NO: 372096
  chr9:37028510-37028719
  hyper
  thyroid vs. lung

SEQ ID NO: 479468 - DNA, 94 bp, Homo sapiens; identical to SEQ ID NO: 454522
  chr9:100503340-100503434
  hyper
  thyroid vs. anorectal,myeloid_neoplasm

SEQ ID NO: 479469 - DNA, 28 bp, Homo sapiens
  chr9:100503960-100503988
  hyper
  thyroid vs. anorectal,myeloid_neoplasm
tgcctcccgggacaaggccagggtcatc

SEQ ID NO: 479470 - DNA, 210 bp, Homo sapiens
  chr9:130639769-130639979
  hyper
  thyroid vs. ovary,upper_gi
cggatcacaaccacggatacacagccgcacagcccccagggagccccgcaccagcacgcccccgccctcccccggtgccgctgcccctccccgcagaggcgcccccccagacacgcgcgggcacgcactgacctggggaggggtgcgggtgggcgccggggccagtgcgtgccctgcccgtcctcgcggcggccggcaaaggcgactatt

SEQ ID NO: 479471 - DNA, 125 bp, Homo sapiens; identical to SEQ ID NO: 372240
  chr9:130640012-130640137
  hyper
  thyroid vs. ovary,upper_gi

SEQ ID NO: 479472 - DNA, 1 bp, Homo sapiens
  chr9:134131738-134131739
  hyper
  thyroid vs. myeloid_neoplasm,anorectal
c

SEQ ID NO: 479473 - DNA, 102 bp, Homo sapiens; identical to SEQ ID NO: 472602
  chr9:134131797-134131899
  hyper
  thyroid vs. myeloid_neoplasm,anorectal

SEQ ID NO: 479474 - DNA, 217 bp, Homo sapiens; identical to SEQ ID NO: 372289
  chr9:139440686-139440903
  hyper
  thyroid vs. ovary

SEQ ID NO: 479475 - DNA, 16 bp, Homo sapiens
  chrX:25021565-25021581
  hyper
  thyroid vs. lung
cgctgtgacacgaccc

SEQ ID NO: 479476 - DNA, 654 bp, Homo sapiens; identical to SEQ ID NO: 458395
  chrX:39953710-39954364
  hyper
  thyroid vs. prostate

SEQ ID NO: 479477 - DNA, 544 bp, Homo sapiens; identical to SEQ ID NO: 458418
  chrX:40013994-40014538
  hyper
  thyroid vs. lung,head_and_neck,upper_gi,cervical, lymphoid_neoplasm,prostate,myeloid_neoplasm,multiple_myeloma

SEQ ID NO: 479478 - DNA, 298 bp, Homo sapiens; identical to SEQ ID NO: 458419
  chrX:40014669-40014967
  hyper
  thyroid vs. lung,head_and_neck,upper_gi,cervical, lymphoid_neoplasm,prostate,myeloid_neoplasm,multiple_myeloma

SEQ ID NO: 479479 - DNA, 52 bp, Homo sapiens
  chrX:40014486-40014538
  hyper
  thyroid vs. lung,liver_bileduct,lymphoid_neoplasm, upper_gi,head_and_neck,bladder_and_urothelial,prostate,renal, myeloid_neoplasm,cervical,colorectal,anorectal
cggctctcgcagacggaaggcattacgaaaccgcttttgtatctgcaggcac

SEQ ID NO: 479480 - DNA, 621 bp, Homo sapiens; identical to SEQ ID NO: 352672
  chrX:40014669-40015290
  hyper
  thyroid vs. lung,liver_bileduct,lymphoid_neoplasm, upper_gi,head_and_neck,bladder_and_urothelial,prostate,renal, myeloid_neoplasm,cervical,colorectal,anorectal

SEQ ID NO: 479481 - DNA, 563 bp, Homo sapiens; identical to SEQ ID NO: 453533
  chrX:71525281-71525844
  hyper
  thyroid vs. prostate

SEQ ID NO: 479482 - DNA, 181 bp, Homo sapiens; identical to SEQ ID NO: 453534
  chrX:71525998-71526179
  hyper
  thyroid vs. prostate

SEQ ID NO: 479483 - DNA, 85 bp, Homo sapiens; identical to SEQ ID NO: 458438
  chrX:123094093-123094178
  hyper
  thyroid vs. upper_gi

SEQ ID NO: 479484 - DNA, 87 bp, Homo sapiens; identical to SEQ ID NO: 362175
  chrX:123094335-123094422
  hyper
  thyroid vs. upper_gi

SEQ ID NO: 479485 - DNA, 183 bp, Homo sapiens; identical to SEQ ID NO: 336772
  chr1:1491949-1492132
  hypo
  thyroid vs. bladder_and_urothelial

SEQ ID NO: 479486 - DNA, 140 bp, Homo sapiens
  chr1:1492373-1492513
  hypo
  thyroid vs. breast,bladder_and_urothelial,renal
cgtaatttacattttaggcatgaatgattttctaaaacccacgatcagagtttctctgggaatcggcgtctggcttaggaacacattcatttgtttgacaaataccttcccaaaactattttaaaacacagctgctgggc

SEQ ID NO: 479487 - DNA, 80 bp, Homo sapiens; identical to SEQ ID NO: 336777
  chr1:1717283-1717363
  hypo
  thyroid vs. lung,pancreas_gallbladder,ovary,upper_gi, renal,bladder_and_urothelial,head_and_neck,lymphoid_neoplasm, colorectal,prostate,sarcoma,cervical,myeloid_neoplasm,breast, uterine,anorectal,melanoma,liver_bileduct,multiple_myeloma,
  CONT. FROM ABOVE: non_cancer

SEQ ID NO: 479488 - DNA, 48 bp, Homo sapiens; identical to SEQ ID NO: 461368
  chr1:2331316-2331364
  hypo
  thyroid vs. multiple_myeloma,sarcoma

SEQ ID NO: 479489 - DNA, 183 bp, Homo sapiens; identical to SEQ ID NO: 345687
  chr1:2331437-2331620
  hypo
  thyroid vs. multiple_myeloma,sarcoma

SEQ ID NO: 479490 - DNA, 88 bp, Homo sapiens
  chr1:2537671-2537759
  hypo
  thyroid vs. anorectal
cggcgcggctcgtacgtagatgatgtgccggctggagttctggtcgtcgttccagatgaagaggtcgatgaggacgcgcctgttgaac

SEQ ID NO: 479491 - DNA, 473 bp, Homo sapiens; identical to SEQ ID NO: 336832
  chr1:3195292-3195765
  hypo
  thyroid vs. anorectal,cervical

SEQ ID NO: 479492 - DNA, 26 bp, Homo sapiens
  chr1:6046186-6046212
  hypo
  thyroid vs. melanoma,cervical
cgcatttgctaacagcacattttgtt

SEQ ID NO: 479493 - DNA, 121 bp, Homo sapiens; identical to SEQ ID NO: 352764
  chr1:6046277-6046398
  hypo
  thyroid vs. melanoma,cervical

SEQ ID NO: 479494 - DNA, 35 bp, Homo sapiens; identical to SEQ ID NO: 336888
  chr1:6707164-6707199
  hypo
  thyroid vs. lung,lymphoid_neoplasm,multiple_myeloma, ovary,upper_gi,pancreas_gallbladder,liver_bileduct, head_and_neck,breast,colorectal,bladder_and_urothelial, non_cancer,myeloid_neoplasm,prostate,sarcoma,uterine,anorectal,
  CONT. FROM ABOVE: renal,melanoma,cervical

SEQ ID NO: 479495 - DNA, 81 bp, Homo sapiens; identical to SEQ ID NO: 336906
  chr1:10591549-10591630
  hypo
  thyroid vs. anorectal

SEQ ID NO: 479496 - DNA, 350 bp, Homo sapiens; identical to SEQ ID NO: 336907
  chr1:10676484-10676834
  hypo
  thyroid vs. melanoma,head_and_neck,ovary,upper_gi, uterine,lung,pancreas_gallbladder,colorectal,prostate

SEQ ID NO: 479497 - DNA, 378 bp, Homo sapiens; identical to SEQ ID NO: 336908
  chr1:10680904-10681282
  hypo
  thyroid vs. ovary,melanoma,head_and_neck,renal,lung, cervical,lymphoid_neoplasm,breast,pancreas_gallbladder, liver_bileduct,colorectal,bladder_and_urothelial,anorectal, upper_gi,prostate,uterine,sarcoma,non_cancer,multiple_myeloma

SEQ ID NO: 479498 - DNA, 876 bp, Homo sapiens
  chr1:10719300-10720176
  hypo
  thyroid vs. ovary,renal,liver_bileduct,head_and_neck, upper_gi,bladder_and_urothelial,uterine,breast, lymphoid_neoplasm,anorectal,prostate,myeloid_neoplasm, pancreas_gallbladder,colorectal,non_cancer,cervical,lung
cgccttctcagccaaccacaggcctgcattcagcacccatggcagcaggtagagaaagcctgtcatgggcagatggggtgtgctgtcatgggcagtcccggtgtgcatgctagcaaaaggcagagcacacttgtgcctgggagtgtgggcgtgtgtgggtggcgtgtgtggggggcgtgtgcgaggtgcacgcgcaggtccaggagcgggggggcgctgcaggagggctcacgcatggttctgtaggtgcaagagtgaatgtgagtgcggcgcgcacctgtgtgtgtggaagcgcatggatgggagcctgagtgtgcacgcgcctggatgcacagtggatgtgtataaggtgtgagcggcaggtgtgtcctcaagcacgggcaaccctggtgaggaaggaggcctcctgtctagtctggctcctggctctgggcattgtggggtggggagcgccttacttgacagtggagacggtccccgtggtgatggagtctgttttggagaaggttgacttcaggtactcgggagtgttgaaggacagggaggcaggaggctctggccctggcccgggggcgctgggggcactgggcacgctggcgaggggtgcgggagccaggctgggggtgggcggaaccttggcggggcctggcttctggatgccccggacgtcgtacttggaagggcgccccaccttgcctgtcttgaaggcgatggccccgcccatgtcggggctgccctccccgggtttgaagaggtgcaggtacttgacattctccaggtcgtacttggatggcttcttgtaggtgctcccgttctggggccgcagattctcgccggtcttcagtttttggatgaagaagtcgtacttggaggccc

SEQ ID NO: 479499 - DNA, 863 bp, Homo sapiens; identical to SEQ ID NO: 345696
  chr1:10719750-10720613
  hypo
  thyroid vs. liver_bileduct,bladder_and_urothelial, anorectal,upper_gi,ovary,head_and_neck,cervical,breast, pancreas_gallbladder,renal,myeloid_neoplasm,colorectal, lymphoid_neoplasm,uterine,prostate,lung,non_cancer

SEQ ID NO: 479500 - DNA, 386 bp, Homo sapiens; identical to SEQ ID NO: 349172
  chr1:10854661-10855047
  hypo
  thyroid vs. lung

SEQ ID NO: 479501 - DNA, 217 bp, Homo sapiens; identical to SEQ ID NO: 336922
  chr1:11856166-11856383
  hypo
  thyroid vs. myeloid_neoplasm

SEQ ID NO: 479502 - DNA, 153 bp, Homo sapiens; identical to SEQ ID NO: 472638
  chr1:12460147-12460300
  hypo
  thyroid vs. liver_bileduct,sarcoma,upper_gi, pancreas_gallbladder,prostate,bladder_and_urothelial,colorectal, non_cancer,breast,renal,anorectal,melanoma,head_and_neck

SEQ ID NO: 479503 - DNA, 174 bp, Homo sapiens; identical to SEQ ID NO: 336931
  chr1:12573235-12573409
  hypo
  thyroid vs. cervical,liver_bileduct,head_and_neck, bladder_and_urothelial,renal,anorectal,prostate,upper_gi,breast, pancreas_gallbladder,melanoma,uterine,colorectal,non_cancer, multiple_myeloma,sarcoma

SEQ ID NO: 479504 - DNA, 129 bp, Homo sapiens
  chr1:16058899-16059028
  hypo
  thyroid vs. bladder_and_urothelial,lymphoid_neoplasm, head_and_neck,colorectal,cervical,pancreas_gallbladder, anorectal,prostate,myeloid_neoplasm,melanoma,renal,upper_gi, uterine,non_cancer,liver_bileduct
cggatgaccgcctctttacgtgccatgaggattgccagaccagcttcttccgctctttgggcacagccaagctgggcgacatcagcgccgtctccaccgagccgggcaaggagtactgcgtcttggtga

SEQ ID NO: 479505 - DNA, 120 bp, Homo sapiens; identical to SEQ ID NO: 336962
  chr1:19720405-19720525
  hypo
  thyroid vs. bladder_and_urothelial

SEQ ID NO: 479506 - DNA, 93 bp, Homo sapiens; identical to SEQ ID NO: 337029
  chr1:40030094-40030187
  hypo
  thyroid vs. multiple_myeloma,bladder_and_urothelial

SEQ ID NO: 479507 - DNA, 100 bp, Homo sapiens; identical to SEQ ID NO: 464884
  chr1:41485949-41486049
  hypo
  thyroid vs. cervical,renal

SEQ ID NO: 479508 - DNA, 91 bp, Homo sapiens; identical to SEQ ID NO: 345703
  chr1:41486164-41486255
  hypo
  thyroid vs. cervical,renal

SEQ ID NO: 479509 - DNA, 38 bp, Homo sapiens; identical to SEQ ID NO: 464886
  chr1:43842627-43842665
  hypo
  thyroid vs. sarcoma,uterine,pancreas_gallbladder,breast, prostate,non_cancer,renal,melanoma,lymphoid_neoplasm,anorectal, ovary,colorectal

SEQ ID NO: 479510 - DNA, 8 bp, Homo sapiens
  chr1:43842779-43842787
  hypo
  thyroid vs. sarcoma,uterine,pancreas_gallbladder,breast, prostate,non_cancer,renal,melanoma,lymphoid_neoplasm,anorectal, ovary,colorectal
agacaagc

SEQ ID NO: 479511 - DNA, 267 bp, Homo sapiens; identical to SEQ ID NO: 337057
  chr1:46500322-46500589
  hypo
  thyroid vs. anorectal,renal,liver_bileduct,uterine, head_and_neck,colorectal

SEQ ID NO: 479512 - DNA, 206 bp, Homo sapiens; identical to SEQ ID NO: 337087
  chr1:54474577-54474783
  hypo
  thyroid vs. renal,cervical,sarcoma

SEQ ID NO: 479513 - DNA, 122 bp, Homo sapiens; identical to SEQ ID NO: 352876
  chr1:54694091-54694213
  hypo
  thyroid vs. head_and_neck,cervical,colorectal, bladder_and_urothelial,multiple_myeloma,uterine,non_cancer, renal,upper_gi,breast,melanoma,prostate,lung,liver_bileduct

SEQ ID NO: 479514 - DNA, 438 bp, Homo sapiens; identical to SEQ ID NO: 464043
  chr1:90308855-90309293
  hypo
  thyroid vs. multiple_myeloma

SEQ ID NO: 479515 - DNA, 134 bp, Homo sapiens; identical to SEQ ID NO: 337113
  chr1:90400255-90400389
  hypo
  thyroid vs. ovary

SEQ ID NO: 479516 - DNA, 37 bp, Homo sapiens; identical to SEQ ID NO: 337119
  chr1:94354617-94354654
  hypo
  thyroid vs. myeloid_neoplasm,colorectal, lymphoid_neoplasm,uterine,multiple_myeloma,cervical,renal, prostate,anorectal,ovary,upper_gi,liver_bileduct,melanoma, non_cancer,breast,lung,pancreas_gallbladder,head_and_neck,
  CONT. FROM ABOVE: bladder_and_urothelial

SEQ ID NO: 479517 - DNA, 115 bp, Homo sapiens; identical to SEQ ID NO: 337134
  chr1:110305380-110305495
  hypo
  thyroid vs. pancreas_gallbladder

SEQ ID NO: 479518 - DNA, 200 bp, Homo sapiens; identical to SEQ ID NO: 337153
  chr1:117630364-117630564
  hypo
  thyroid vs. melanoma,pancreas_gallbladder,uterine, liver_bileduct,prostate,breast,non_cancer,lung,sarcoma, colorectal,renal,lymphoid_neoplasm,head_and_neck,cervical, bladder_and_urothelial

SEQ ID NO: 479519 - DNA, 49 bp, Homo sapiens; identical to SEQ ID NO: 337160
  chr1:150935078-150935127
  hypo
  thyroid vs. lung,sarcoma,cervical,head_and_neck,upper_gi, breast,pancreas_gallbladder,renal,colorectal

SEQ ID NO: 479520 - DNA, 223 bp, Homo sapiens; identical to SEQ ID NO: 337176
  chr1:154931252-154931475
  hypo
  thyroid vs. uterine,head_and_neck,ovary,liver_bileduct, myeloid_neoplasm,upper_gi,pancreas_gallbladder,breast, colorectal,cervical,non_cancer,melanoma,sarcoma,lung,renal, bladder_and_urothelial,prostate,multiple_myeloma,
  CONT. FROM ABOVE: lymphoid_neoplasm,anorectal

SEQ ID NO: 479521 - DNA, 145 bp, Homo sapiens; identical to SEQ ID NO: 337196
  chr1:157678824-157678969
  hypo
  thyroid vs. lung

SEQ ID NO: 479522 - DNA, 200 bp, Homo sapiens; identical to SEQ ID NO: 337225
  chr1:167486836-167487036
  hypo
  thyroid vs. lung,ovary,uterine,lymphoid_neoplasm,renal, bladder_and_urothelial,sarcoma,pancreas_gallbladder,cervical, upper_gi,anorectal,breast

SEQ ID NO: 479523 - DNA, 75 bp, Homo sapiens; identical to SEQ ID NO: 337251
  chr1:180892057-180892132
  hypo
  thyroid vs. breast,bladder_and_urothelial,head_and_neck, pancreas_gallbladder,lung,anorectal,non_cancer,melanoma, prostate,liver_bileduct,uterine,myeloid_neoplasm

SEQ ID NO: 479524 - DNA, 388 bp, Homo sapiens; identical to SEQ ID NO: 337262
  chr1:193149436-193149824
  hypo
  thyroid vs. head_and_neck,lymphoid_neoplasm,cervical, anorectal,melanoma

SEQ ID NO: 479525 - DNA, 205 bp, Homo sapiens; identical to SEQ ID NO: 470018
  chr1:214637813-214638018
  hypo
  thyroid vs. cervical,renal,bladder_and_urothelial, colorectal,prostate

SEQ ID NO: 479526 - DNA, 34 bp, Homo sapiens; identical to SEQ ID NO: 352966
  chr1:214638090-214638124
  hypo
  thyroid vs. cervical,renal,bladder_and_urothelial, colorectal,prostate

SEQ ID NO: 479527 - DNA, 249 bp, Homo sapiens
  chr1:226077130-226077379
  hypo
  thyroid vs. myeloid_neoplasm,liver_bileduct
cgttctctgcaagaggctcagttcccccagctgctggtaagtggacctagagtcttgttccttgctgcaaccaaacaactgacaggaaccagaatggctcaggcaacgccagggctctaagggccaatccagtctgcagggatgagcatccgggcccgtgctcagagggtcccggggcctcatgagatcctgagctggtggtccccagttgtgaaaccagatttcccactgttctggggggaccttcct

SEQ ID NO: 479528 - DNA, 203 bp, Homo sapiens; identical to SEQ ID NO: 337351
  chr1:228361379-228361582
  hypo
  thyroid vs. myeloid_neoplasm

SEQ ID NO: 479529 - DNA, 262 bp, Homo sapiens; identical to SEQ ID NO: 337367
  chr1:230266303-230266565
  hypo
  thyroid vs. sarcoma,liver_bileduct,myeloid_neoplasm, anorectal,melanoma,cervical

SEQ ID NO: 479530 - DNA, 85 bp, Homo sapiens; identical to SEQ ID NO: 337368
  chr1:230272610-230272695
  hypo
  thyroid vs. myeloid_neoplasm

SEQ ID NO: 479531 - DNA, 190 bp, Homo sapiens
  chr1:230529556-230529746
  hypo
  thyroid vs. liver_bileduct,lung,head_and_neck
cgagactccgtctcaaaaaaaaaaaaaaaaaaaataataggcccggggcccgccagtccacagcctgattagaaacatgtggcttcgcaaggctctccctcactggctccccgccctagagtccgccacacctgccccggcctggcatcctctgcaggcttccagctctcccactcttctggctcattcc

SEQ ID NO: 479532 - DNA, 184 bp, Homo sapiens; identical to SEQ ID NO: 337375
  chr1:231037680-231037864
  hypo
  thyroid vs. sarcoma

SEQ ID NO: 479533 - DNA, 325 bp, Homo sapiens
  chr1:234845143-234845468
  hypo
  thyroid vs. cervical,melanoma,prostate,head_and_neck, myeloid_neoplasm,multiple_myeloma
tgaagagacctctttcaggcagagggaacaaaataagccacagtaagtatgcttggacctgcatagaagtagaaggaagatgaggggtgactgaaaggaagagcagtcaaagatgaggcggggaagcaagccgactgggtgtcaggagcaggctcagggacttgggcttggccggtgagcagtcaaggtgcacagagctgttcctgggtagcgcctctcatggtgccgctgactccaccggggtgaccgctgtgcccggggctgctggtcaggatgcaaaagcactttagagtgaaggtcacctcaggcaacaggcaaaacagac

SEQ ID NO: 479534 - DNA, 120 bp, Homo sapiens; identical to SEQ ID NO: 337413
  chr1:243479828-243479948
  hypo
  thyroid vs. bladder_and_urothelial

SEQ ID NO: 479535 - DNA, 650 bp, Homo sapiens; identical to SEQ ID NO: 337414
  chr1:243637544-243638194
  hypo
  thyroid vs. sarcoma,lung,cervical

SEQ ID NO: 479536 - DNA, 764 bp, Homo sapiens; identical to SEQ ID NO: 376148
  chr1:246310723-246311487
  hypo
  thyroid vs. sarcoma

SEQ ID NO: 479537 - DNA, 168 bp, Homo sapiens; identical to SEQ ID NO: 379164
  chr10:422180-422348
  hypo
  thyroid vs. lymphoid_neoplasm

SEQ ID NO: 479538 - DNA, 50 bp, Homo sapiens; identical to SEQ ID NO: 464935
  chr10:1120729-1120779
  hypo
  thyroid vs. uterine,head_and_neck,bladder_and_urothelial, prostate,renal,multiple_myeloma,myeloid_neoplasm,colorectal, cervical,anorectal,breast,lymphoid_neoplasm, pancreas_gallbladder,ovary,sarcoma,liver_bileduct,non_cancer

SEQ ID NO: 479539 - DNA, 28 bp, Homo sapiens
  chr10:1120937-1120965
  hypo
  thyroid vs. uterine,head_and_neck,bladder_and_urothelial, prostate,renal,multiple_myeloma,myeloid_neoplasm,colorectal, cervical,anorectal,breast,lymphoid_neoplasm, pancreas_gallbladder,ovary,sarcoma,liver_bileduct,non_cancer
aattcatttaaaagctttgctgagtcac

SEQ ID NO: 479540 - DNA, 188 bp, Homo sapiens; identical to SEQ ID NO: 340536
  chr10:3954899-3955087
  hypo
  thyroid vs. ovary

SEQ ID NO: 479541 - DNA, 193 bp, Homo sapiens; identical to SEQ ID NO: 365298
  chr10:15254646-15254839
  hypo
  thyroid vs. ovary

SEQ ID NO: 479542 - DNA, 80 bp, Homo sapiens; identical to SEQ ID NO: 340586
  chr10:16806491-16806571
  hypo
  thyroid vs. ovary,multiple_myeloma,liver_bileduct,lung, upper_gi,uterine,lymphoid_neoplasm,renal,breast, bladder_and_urothelial,pancreas_gallbladder

SEQ ID NO: 479543 - DNA, 111 bp, Homo sapiens; identical to SEQ ID NO: 340617
  chr10:29581547-29581658
  hypo
  thyroid vs. anorectal,myeloid_neoplasm,uterine, bladder_and_urothelial,pancreas_gallbladder

SEQ ID NO: 479544 - DNA, 269 bp, Homo sapiens; identical to SEQ ID NO: 340635
  chr10:44874128-44874397
  hypo
  thyroid vs. renal,cervical

SEQ ID NO: 479545 - DNA, 238 bp, Homo sapiens; identical to SEQ ID NO: 340659
  chr10:73514960-73515198
  hypo
  thyroid vs. sarcoma

SEQ ID NO: 479546 - DNA, 73 bp, Homo sapiens; identical to SEQ ID NO: 340671
  chr10:76966489-76966562
  hypo
  thyroid vs. lymphoid_neoplasm,pancreas_gallbladder, sarcoma,non_cancer,prostate,multiple_myeloma,colorectal,renal, upper_gi,ovary,uterine,breast,liver_bileduct, bladder_and_urothelial

SEQ ID NO: 479547 - DNA, 499 bp, Homo sapiens; identical to SEQ ID NO: 340677
  chr10:79601557-79602056
  hypo
  thyroid vs. anorectal,pancreas_gallbladder,colorectal, lung,melanoma,upper_gi,lymphoid_neoplasm,breast,liver_bileduct, bladder_and_urothelial,non_cancer,prostate,head_and_neck, myeloid_neoplasm,sarcoma,cervical,uterine

SEQ ID NO: 479548 - DNA, 120 bp, Homo sapiens
  chr10:88857177-88857297
  hypo
  thyroid vs. upper_gi,head_and_neck,colorectal,uterine, lung,multiple_myeloma,sarcoma,breast,cervical
cgtggtggggggcctacaaaaattagccaggcgtggtggcggggagggggttgggcagtgcttgtagttccagctacttgggagaaccacttgaaccagggagagaggttgcagtgagcc

SEQ ID NO: 479549 - DNA, 32 bp, Homo sapiens; identical to SEQ ID NO: 340711
  chr10:98983004-98983036
  hypo
  thyroid vs. anorectal,breast,prostate,colorectal, bladder_and_urothelial,liver_bileduct,head_and_neck,melanoma, uterine,cervical,non_cancer,upper_gi,pancreas_gallbladder,renal, lung,sarcoma

SEQ ID NO: 479550 - DNA, 723 bp, Homo sapiens; identical to SEQ ID NO: 475294
  chr10:106097237-106097960
  hypo
  thyroid vs. multiple_myeloma,head_and_neck, myeloid_neoplasm,uterine,sarcoma,cervical

SEQ ID NO: 479551 - DNA, 165 bp, Homo sapiens; identical to SEQ ID NO: 351101
  chr10:106098025-106098190
  hypo
  thyroid vs. multiple_myeloma,head_and_neck, myeloid_neoplasm,uterine,sarcoma,cervical

SEQ ID NO: 479552 - DNA, 79 bp, Homo sapiens; identical to SEQ ID NO: 340753
  chr10:120601836-120601915
  hypo
  thyroid vs. lung,ovary,multiple_myeloma,colorectal, lymphoid_neoplasm,breast

SEQ ID NO: 479553 - DNA, 92 bp, Homo sapiens; identical to SEQ ID NO: 340778
  chr10:126775448-126775540
  hypo
  thyroid vs. ovary,sarcoma,cervical,anorectal,lung,renal

SEQ ID NO: 479554 - DNA, 349 bp, Homo sapiens
  chr10:133920829-133921178
  hypo
  thyroid vs. anorectal
cgccccgagggacacacgctccttgatggtcaacaggccaggcttgcgggctccccaggtgccggcaaggttccagggccggcgtctgagggctgcaacccagacccgctgggcaccctgcggggcatgtttagttgtacctggaggagaggatgtgctctcttggcacaacgtgcagaaggcaccggaggaaaggaatggagaagaagcctgtttgcctcagagctcctcatcctggacgccctcgccagagggttcatgttatggtttcctgcataagcgatctgagccctgcctcctcaagcgtaactgacagcatgctggatgcacaggcagcaactcccttttg

SEQ ID NO: 479555 - DNA, 163 bp, Homo sapiens; identical to SEQ ID NO: 365476
  chr10:133921207-133921370
  hypo
  thyroid vs. anorectal

SEQ ID NO: 479556 - DNA, 51 bp, Homo sapiens; identical to SEQ ID NO: 464960
  chr10:134793882-134793933
  hypo
  thyroid vs. anorectal

SEQ ID NO: 479557 - DNA, 144 bp, Homo sapiens; identical to SEQ ID NO: 346012
  chr10:134793968-134794112
  hypo
  thyroid vs. anorectal

SEQ ID NO: 479558 - DNA, 66 bp, Homo sapiens; identical to SEQ ID NO: 340855
  chr10:134878532-134878598
  hypo
  thyroid vs. head_and_neck,bladder_and_urothelial,breast, sarcoma,colorectal,non_cancer,prostate,pancreas_gallbladder, melanoma

SEQ ID NO: 479559 - DNA, 241 bp, Homo sapiens; identical to SEQ ID NO: 472746
  chr11:487587-487828
  hypo
  thyroid vs. anorectal

SEQ ID NO: 479560 - DNA, 649 bp, Homo sapiens; identical to SEQ ID NO: 365535
  chr11:487857-488506
  hypo
  thyroid vs. anorectal

SEQ ID NO: 479561 - DNA, 158 bp, Homo sapiens
  chr11:1095394-1095552
  hypo
  thyroid vs. lung,ovary,multiple_myeloma, lymphoid_neoplasm,upper_gi,pancreas_gallbladder,head_and_neck, liver_bileduct
cgcagcatgtccgggcagctgaggccccaggcaccacttcctgctggtcgtctgagggccgaggcctccagcaacccttgggtgcagggtctgccgagccctccacattttcaccgtgccccgctgtgcctggcgaggtggctggctgcagtgaggtc

SEQ ID NO: 479562 - DNA, 706 bp, Homo sapiens; identical to SEQ ID NO: 474530
  chr11:1535842-1536548
  hypo
  thyroid vs. myeloid_neoplasm,cervical,breast

SEQ ID NO: 479563 - DNA, 95 bp, Homo sapiens; identical to SEQ ID NO: 365576
  chr11:1536583-1536678
  hypo
  thyroid vs. myeloid_neoplasm,cervical,breast

SEQ ID NO: 479564 - DNA, 167 bp, Homo sapiens; identical to SEQ ID NO: 340924
  chr11:1552182-1552349
  hypo
  thyroid vs. prostate,renal,colorectal,non_cancer

SEQ ID NO: 479565 - DNA, 62 bp, Homo sapiens; identical to SEQ ID NO: 365586
  chr11:2225626-2225688
  hypo
  thyroid vs. ovary,multiple_myeloma,lymphoid_neoplasm

SEQ ID NO: 479566 - DNA, 9 bp, Homo sapiens
  chr11:2236833-2236842
  hypo
  thyroid vs. lung
cgggggacc

SEQ ID NO: 479567 - DNA, 55 bp, Homo sapiens; identical to SEQ ID NO: 340955
  chr11:2987095-2987150
  hypo
  thyroid vs. lung,ovary,breast,myeloid_neoplasm, lymphoid_neoplasm,colorectal,prostate,sarcoma,head_and_neck, uterine,renal,upper_gi,anorectal,melanoma,pancreas_gallbladder

SEQ ID NO: 479568 - DNA, 563 bp, Homo sapiens; identical to SEQ ID NO: 341027
  chr11:34516985-34517548
  hypo

SEQ ID NO: 479569 - DNA, 606 bp, Homo sapiens; identical to SEQ ID NO: 341048
  chr11:46391523-46392129
  hypo
  thyroid vs. renal,head_and_neck,bladder_and_urothelial, melanoma,pancreas_gallbladder,cervical,breast,prostate, lymphoid_neoplasm,non_cancer,myeloid_neoplasm,sarcoma,uterine, multiple_myeloma,colorectal,upper_gi

SEQ ID NO: 479570 - DNA, 432 bp, Homo sapiens; identical to SEQ ID NO: 477978
  chr11:57243735-57244167
  hypo
  thyroid vs. breast,anorectal,upper_gi

SEQ ID NO: 479571 - DNA, 139 bp, Homo sapiens; identical to SEQ ID NO: 341076
  chr11:61662946-61663085
  hypo
  thyroid vs. melanoma,sarcoma,anorectal,renal,prostate, non_cancer,breast,uterine,bladder_and_urothelial, myeloid_neoplasm,lymphoid_neoplasm,cervical, pancreas_gallbladder

SEQ ID NO: 479572 - DNA, 184 bp, Homo sapiens
  chr11:63562755-63562939
  hypo
  thyroid vs. liver_bileduct,renal,cervical,anorectal, head_and_neck,pancreas_gallbladder,prostate,upper_gi,breast, uterine,ovary,bladder_and_urothelial,colorectal,melanoma,lung, non_cancer
cgcacgccaccacgcctgactaatttttgtatttttacaccatgttggccaggctggtaaatttggtgatttcttaagcgtatcttgggggaaaaaagtttctgagagcagtaagtataaacgtgtgtctaaaatgtgtgtccttttatttatttatttttttgagatggagtcttgctctgtc

SEQ ID NO: 479573 - DNA, 329 bp, Homo sapiens; identical to SEQ ID NO: 341088
  chr11:63676319-63676648
  hypo
  thyroid vs. melanoma

SEQ ID NO: 479574 - DNA, 142 bp, Homo sapiens; identical to SEQ ID NO: 341108
  chr11:64774064-64774206
  hypo
  thyroid vs. sarcoma

SEQ ID NO: 479575 - DNA, 160 bp, Homo sapiens; identical to SEQ ID NO: 341110
  chr11:64950885-64951045
  hypo
  thyroid vs. myeloid_neoplasm

SEQ ID NO: 479576 - DNA, 167 bp, Homo sapiens; identical to SEQ ID NO: 346030
  chr11:65685172-65685339
  hypo
  thyroid vs. myeloid_neoplasm,anorectal,non_cancer, uterine,prostate,colorectal,bladder_and_urothelial, multiple_myeloma,cervical,breast,melanoma

SEQ ID NO: 479577 - DNA, 33 bp, Homo sapiens; identical to SEQ ID NO: 477258
  chr11:66658557-66658590
  hypo
  thyroid vs. liver_bileduct

SEQ ID NO: 479578 - DNA, 112 bp, Homo sapiens; identical to SEQ ID NO: 351230
  chr11:66886029-66886141
  hypo
  thyroid vs. multiple_myeloma,cervical,non_cancer, anorectal,lymphoid_neoplasm

SEQ ID NO: 479579 - DNA, 179 bp, Homo sapiens; identical to SEQ ID NO: 334308
  chr11:68080751-68080930
  hypo
  thyroid vs. sarcoma,upper_gi

SEQ ID NO: 479580 - DNA, 98 bp, Homo sapiens; identical to SEQ ID NO: 341148
  chr11:68216755-68216853
  hypo
  thyroid vs. pancreas_gallbladder,lung

SEQ ID NO: 479581 - DNA, 171 bp, Homo sapiens; identical to SEQ ID NO: 472778
  chr11:69206214-69206385
  hypo
  thyroid vs. melanoma,breast

SEQ ID NO: 479582 - DNA, 299 bp, Homo sapiens; identical to SEQ ID NO: 354779
  chr11:69206414-69206713
  hypo
  thyroid vs. melanoma,breast

SEQ ID NO: 479583 - DNA, 141 bp, Homo sapiens; identical to SEQ ID NO: 341167
  chr11:70164164-70164305
  hypo
  thyroid vs. head_and_neck,sarcoma,renal

SEQ ID NO: 479584 - DNA, 31 bp, Homo sapiens; identical to SEQ ID NO: 456406
  chr11:75852075-75852106
  hypo
  thyroid vs. cervical,melanoma,liver_bileduct,colorectal, bladder_and_urothelial,anorectal,head_and_neck,uterine,renal, ovary,lung,upper_gi,lymphoid_neoplasm,pancreas_gallbladder, myeloid_neoplasm

SEQ ID NO: 479585 - DNA, 366 bp, Homo sapiens; identical to SEQ ID NO: 341204
  chr11:78534109-78534475
  hypo
  thyroid vs. anorectal,cervical

SEQ ID NO: 479586 - DNA, 80 bp, Homo sapiens; identical to SEQ ID NO: 365797
  chr11:94895741-94895821
  hypo
  thyroid vs. head_and_neck,sarcoma,myeloid_neoplasm, cervical,anorectal

SEQ ID NO: 479587 - DNA, 158 bp, Homo sapiens; identical to SEQ ID NO: 341223
  chr11:108031546-108031704
  hypo
  thyroid vs. ovary,lung,colorectal,multiple_myeloma

SEQ ID NO: 479588 - DNA, 66 bp, Homo sapiens; identical to SEQ ID NO: 334374
  chr11:119145611-119145677
  hypo
  thyroid vs. ovary,lung,lymphoid_neoplasm

SEQ ID NO: 479589 - DNA, 301 bp, Homo sapiens; identical to SEQ ID NO: 359947
  chr11:119599011-119599312
  hypo
  thyroid vs. liver_bileduct,ovary,lung, pancreas_gallbladder

SEQ ID NO: 479590 - DNA, 125 bp, Homo sapiens; identical to SEQ ID NO: 341281
  chr11:129803851-129803976
  hypo
  thyroid vs. anorectal,breast,pancreas_gallbladder, non_cancer,cervical,prostate,colorectal,bladder_and_urothelial, liver_bileduct,upper_gi

SEQ ID NO: 479591 - DNA, 39 bp, Homo sapiens; identical to SEQ ID NO: 334408
  chr11:130083134-130083173
  hypo
  thyroid vs. pancreas_gallbladder,liver_bileduct

SEQ ID NO: 479592 - DNA, 194 bp, Homo sapiens; identical to SEQ ID NO: 341325
  chr12:2972300-2972494
  hypo
  thyroid vs. renal,colorectal,head_and_neck,upper_gi, melanoma

SEQ ID NO: 479593 - DNA, 120 bp, Homo sapiens; identical to SEQ ID NO: 341327
  chr12:3030601-3030721
  hypo
  thyroid vs. liver_bileduct,pancreas_gallbladder,ovary, breast,sarcoma,colorectal,head_and_neck,renal,anorectal, lymphoid_neoplasm,melanoma

SEQ ID NO: 479594 - DNA, 407 bp, Homo sapiens; identical to SEQ ID NO: 479295
  chr12:6492947-6493354
  hypo
  thyroid vs. sarcoma,myeloid_neoplasm

SEQ ID NO: 479595 - DNA, 34 bp, Homo sapiens; identical to SEQ ID NO: 479296
  chr12:6493416-6493450
  hypo
  thyroid vs. sarcoma,myeloid_neoplasm

SEQ ID NO: 479596 - DNA, 115 bp, Homo sapiens; identical to SEQ ID NO: 360019
  chr12:6493504-6493619
  hypo
  thyroid vs. sarcoma,myeloid_neoplasm

SEQ ID NO: 479597 - DNA, 99 bp, Homo sapiens; identical to SEQ ID NO: 354866
  chr12:6686943-6687042
  hypo
  thyroid vs. anorectal

SEQ ID NO: 479598 - DNA, 294 bp, Homo sapiens; identical to SEQ ID NO: 360027
  chr12:9216950-9217244
  hypo
  thyroid vs. pancreas_gallbladder,lung,breast,renal

SEQ ID NO: 479599 - DNA, 58 bp, Homo sapiens; identical to SEQ ID NO: 466292
  chr12:19283146-19283204
  hypo
  thyroid vs. anorectal

SEQ ID NO: 479600 - DNA, 250 bp, Homo sapiens; identical to SEQ ID NO: 466293
  chr12:19283425-19283675
  hypo
  thyroid vs. anorectal

SEQ ID NO: 479601 - DNA, 138 bp, Homo sapiens; identical to SEQ ID NO: 341375
  chr12:26398950-26399088
  hypo
  thyroid vs. head_and_neck,renal,prostate, lymphoid_neoplasm,anorectal

SEQ ID NO: 479602 - DNA, 48 bp, Homo sapiens; identical to SEQ ID NO: 341383
  chr12:32142934-32142982
  hypo
  thyroid vs. anorectal

SEQ ID NO: 479603 - DNA, 71 bp, Homo sapiens; identical to SEQ ID NO: 341406
  chr12:50322856-50322927
  hypo
  thyroid vs. ovary,multiple_myeloma,lung

SEQ ID NO: 479604 - DNA, 98 bp, Homo sapiens; identical to SEQ ID NO: 341433
  chr12:54651346-54651444
  hypo
  thyroid vs. cervical

SEQ ID NO: 479605 - DNA, 124 bp, Homo sapiens; identical to SEQ ID NO: 341468
  chr12:95602750-95602874
  hypo
  thyroid vs. head_and_neck,upper_gi,pancreas_gallbladder

SEQ ID NO: 479606 - DNA, 133 bp, Homo sapiens; identical to SEQ ID NO: 341471
  chr12:96566303-96566436
  hypo
  thyroid vs. multiple_myeloma,liver_bileduct

SEQ ID NO: 479607 - DNA, 215 bp, Homo sapiens; identical to SEQ ID NO: 465031
  chr12:105392597-105392812
  hypo
  thyroid vs. sarcoma

SEQ ID NO: 479608 - DNA, 50 bp, Homo sapiens; identical to SEQ ID NO: 366016
  chr12:105392841-105392891
  hypo
  thyroid vs. sarcoma

SEQ ID NO: 479609 - DNA, 178 bp, Homo sapiens; identical to SEQ ID NO: 341481
  chr12:109050967-109051145
  hypo
  thyroid vs. bladder_and_urothelial,anorectal, head_and_neck,prostate,renal,pancreas_gallbladder,non_cancer, sarcoma,lymphoid_neoplasm,melanoma

SEQ ID NO: 479610 - DNA, 153 bp, Homo sapiens; identical to SEQ ID NO: 465033
  chr12:109488367-109488520
  hypo
  thyroid vs. melanoma

SEQ ID NO: 479611 - DNA, 88 bp, Homo sapiens
  chr12:110518057-110518145
  hypo
cgctcccacccccgagatggagtctcgctctgttgccccggttgcagtgcagcggcgccacatcggctcactgcaaccttcccctctc

SEQ ID NO: 479612 - DNA, 175 bp, Homo sapiens; identical to SEQ ID NO: 354938
  chr12:112681200-112681375
  hypo
  thyroid vs. liver_bileduct,bladder_and_urothelial, multiple_myeloma,colorectal,head_and_neck,sarcoma,cervical, pancreas_gallbladder,non_cancer,anorectal,upper_gi,melanoma, renal,lymphoid_neoplasm,breast,myeloid_neoplasm,uterine,
  CONT. FROM ABOVE: prostate

SEQ ID NO: 479613 - DNA, 73 bp, Homo sapiens; identical to SEQ ID NO: 341510
  chr12:112684738-112684811
  hypo
  thyroid vs. colorectal,lymphoid_neoplasm, bladder_and_urothelial,upper_gi,pancreas_gallbladder,prostate, renal,non_cancer

SEQ ID NO: 479614 - DNA, 788 bp, Homo sapiens; identical to SEQ ID NO: 341513
  chr12:113685206-113685994
  hypo
  thyroid vs. liver_bileduct,multiple_myeloma

SEQ ID NO: 479615 - DNA, 140 bp, Homo sapiens; identical to SEQ ID NO: 341535
  chr12:117392984-117393124
  hypo
  thyroid vs. upper_gi,lymphoid_neoplasm,renal, bladder_and_urothelial

SEQ ID NO: 479616 - DNA, 79 bp, Homo sapiens; identical to SEQ ID NO: 341546
  chr12:118461377-118461456
  hypo
  thyroid vs. liver_bileduct

SEQ ID NO: 479617 - DNA, 336 bp, Homo sapiens; identical to SEQ ID NO: 465046
  chr12:120148396-120148732
  hypo
  thyroid vs. myeloid_neoplasm,non_cancer

SEQ ID NO: 479618 - DNA, 65 bp, Homo sapiens
  chr12:120172992-120173057
  hypo
  thyroid vs. sarcoma,renal,ovary,prostate, myeloid_neoplasm,uterine,pancreas_gallbladder,melanoma,upper_gi, breast,head_and_neck,non_cancer,bladder_and_urothelial, colorectal,multiple_myeloma,cervical,lymphoid_neoplasm,
  CONT. FROM ABOVE: anorectal,liver_bileduct
cgttccgtgatctcccggcggagatggtccacttcacttcgcagttgtacaatctcgtcgttggc

SEQ ID NO: 479619 - DNA, 136 bp, Homo sapiens; identical to SEQ ID NO: 346060
  chr12:120173137-120173273
  hypo
  thyroid vs. sarcoma,renal,ovary,prostate, myeloid_neoplasm,uterine,pancreas_gallbladder,melanoma,upper_gi, breast,head_and_neck,non_cancer,bladder_and_urothelial, colorectal,multiple_myeloma,cervical,lymphoid_neoplasm,
  CONT. FROM ABOVE: anorectal,liver_bileduct

SEQ ID NO: 479620 - DNA, 143 bp, Homo sapiens; identical to SEQ ID NO: 341555
  chr12:120613510-120613653
  hypo
  thyroid vs. multiple_myeloma,colorectal,prostate, lymphoid_neoplasm,sarcoma,myeloid_neoplasm,anorectal, bladder_and_urothelial,non_cancer,renal,melanoma

SEQ ID NO: 479621 - DNA, 97 bp, Homo sapiens; identical to SEQ ID NO: 341556
  chr12:121200066-121200163
  hypo
  thyroid vs. multiple_myeloma,lymphoid_neoplasm,renal, prostate,myeloid_neoplasm,colorectal,upper_gi,uterine

SEQ ID NO: 479622 - DNA, 200 bp, Homo sapiens; identical to SEQ ID NO: 341558
  chr12:121205162-121205362
  hypo
  thyroid vs. myeloid_neoplasm,sarcoma,melanoma,prostate, anorectal,cervical,non_cancer,bladder_and_urothelial, multiple_myeloma,renal,pancreas_gallbladder,lymphoid_neoplasm, head_and_neck,upper_gi,uterine,liver_bileduct

SEQ ID NO: 479623 - DNA, 124 bp, Homo sapiens; identical to SEQ ID NO: 341563
  chr12:121756071-121756195
  hypo
  thyroid vs. anorectal,renal,ovary,pancreas_gallbladder, colorectal,melanoma,cervical,bladder_and_urothelial,upper_gi, lymphoid_neoplasm,uterine,head_and_neck,non_cancer, liver_bileduct,breast,myeloid_neoplasm,multiple_myeloma,sarcoma,
  CONT. FROM ABOVE: lung

SEQ ID NO: 479624 - DNA, 164 bp, Homo sapiens
  chr12:122623827-122623991
  hypo
  thyroid vs. sarcoma,anorectal,melanoma
cggtcctcgaagccacagggagggtgagtgccacccctgctgtgacaggcggaaaccaggactccctccactgagtggtagagcccaatttgaagcctaatggagcatgtccacctctaggggctctcgtgccaaggccaccttgcactcagccttccaggtgg

SEQ ID NO: 479625 - DNA, 203 bp, Homo sapiens
  chr12:123997867-123998070
  hypo
  thyroid vs. melanoma,uterine,liver_bileduct,breast, cervical,non_cancer,renal
cgacatgccctgtcctggggcgccaggacccactcactcatttactccttgctggggctgccttggctccccgagaggtgggcgggaggcgagcatgaggagagaggggcggctgggtctatgtggaagcccagcagcctcatcaccttcctgggcggcagccgtaggagctatgagaccgaggcagaagcctggcgcctgac

SEQ ID NO: 479626 - DNA, 150 bp, Homo sapiens; identical to SEQ ID NO: 354992
  chr12:125500633-125500783
  hypo
  thyroid vs. ovary,head_and_neck

SEQ ID NO: 479627 - DNA, 46 bp, Homo sapiens; identical to SEQ ID NO: 341614
  chr12:128489355-128489401
  hypo
  thyroid vs. myeloid_neoplasm

SEQ ID NO: 479628 - DNA, 129 bp, Homo sapiens; identical to SEQ ID NO: 348587
  chr12:132222124-132222253
  hypo
  thyroid vs. myeloid_neoplasm

SEQ ID NO: 479629 - DNA, 176 bp, Homo sapiens; identical to SEQ ID NO: 341658
  chr12:132504709-132504885
  hypo
  thyroid vs. ovary

SEQ ID NO: 479630 - DNA, 816 bp, Homo sapiens; identical to SEQ ID NO: 341659
  chr12:132536813-132537629
  hypo
  thyroid vs. uterine,liver_bileduct,colorectal,renal, myeloid_neoplasm,lymphoid_neoplasm,anorectal,sarcoma,ovary, upper_gi,breast,prostate,non_cancer,pancreas_gallbladder, head_and_neck,cervical,melanoma,multiple_myeloma,lung,
  CONT. FROM ABOVE: bladder_and_urothelial

SEQ ID NO: 479631 - DNA, 136 bp, Homo sapiens; identical to SEQ ID NO: 341669
  chr12:133097814-133097950
  hypo
  thyroid vs. liver_bileduct,cervical,multiple_myeloma, prostate,non_cancer,sarcoma,uterine,renal,breast,melanoma, myeloid_neoplasm

SEQ ID NO: 479632 - DNA, 246 bp, Homo sapiens
  chr12:133393414-133393660
  hypo
  thyroid vs. liver_bileduct
cgctggaccaccatggctttaacaacaaggtgacgtcgcttttcagacatgcagctggagtaggagagaagaggatccagactcatgagcacggcactttctcatcccacaaaggcttcactctgagaggagcagcccatgggccccgtcccacaggcggggtggccaggataaggcccacagcccctctggtgtccacgtccttcctgtaaggtgaacctgccctccacacctccacactctaac

SEQ ID NO: 479633 - DNA, 19 bp, Homo sapiens
  chr13:20392340-20392359
  hypo
  thyroid vs. myeloid_neoplasm,sarcoma,anorectal,cervical, melanoma,multiple_myeloma,colorectal,non_cancer,prostate
cggtgggtgatttggggta

SEQ ID NO: 479634 - DNA, 261 bp, Homo sapiens; identical to SEQ ID NO: 355030
  chr13:20392445-20392706
  hypo
  thyroid vs. myeloid_neoplasm,sarcoma,anorectal,cervical, melanoma,multiple_myeloma,colorectal,non_cancer,prostate

SEQ ID NO: 479635 - DNA, 506 bp, Homo sapiens; identical to SEQ ID NO: 341686
  chr13:20979799-20980305
  hypo
  thyroid vs. multiple_myeloma,colorectal,renal

SEQ ID NO: 479636 - DNA, 126 bp, Homo sapiens; identical to SEQ ID NO: 472834
  chr13:28745545-28745671
  hypo
  thyroid vs. pancreas_gallbladder,lymphoid_neoplasm, multiple_myeloma,prostate,non_cancer,breast,head_and_neck, liver_bileduct,bladder_and_urothelial,sarcoma,melanoma, anorectal,upper_gi,myeloid_neoplasm,lung,cervical,uterine

SEQ ID NO: 479637 - DNA, 7 bp, Homo sapiens
  chr13:29933419-29933426
  hypo
  thyroid vs. sarcoma,cervical
cggcagc

SEQ ID NO: 479638 - DNA, 116 bp, Homo sapiens; identical to SEQ ID NO: 341718
  chr13:32983242-32983358
  hypo
  thyroid vs. melanoma,liver_bileduct,renal,sarcoma, myeloid_neoplasm,lymphoid_neoplasm,bladder_and_urothelial, non_cancer,pancreas_gallbladder,colorectal,multiple_myeloma, breast,prostate

SEQ ID NO: 479639 - DNA, 199 bp, Homo sapiens; identical to SEQ ID NO: 334756
  chr13:41364049-41364248
  hypo
  thyroid vs. lung,sarcoma,upper_gi

SEQ ID NO: 479640 - DNA, 91 bp, Homo sapiens; identical to SEQ ID NO: 341725
  chr13:41453098-41453189
  hypo
  thyroid vs. sarcoma,breast

SEQ ID NO: 479641 - DNA, 284 bp, Homo sapiens; identical to SEQ ID NO: 334760
  chr13:44544261-44544545
  hypo
  thyroid vs. ovary,lung,pancreas_gallbladder, head_and_neck

SEQ ID NO: 479642 - DNA, 141 bp, Homo sapiens; identical to SEQ ID NO: 341739
  chr13:52335934-52336075
  hypo
  thyroid vs. liver_bileduct,head_and_neck,sarcoma, cervical,colorectal,bladder_and_urothelial,breast,non_cancer, prostate,anorectal,pancreas_gallbladder,upper_gi

SEQ ID NO: 479643 - DNA, 131 bp, Homo sapiens
  chr13:76352658-76352789
  hypo
  thyroid vs. bladder_and_urothelial,renal,ovary,uterine, lymphoid_neoplasm,liver_bileduct,sarcoma,myeloid_neoplasm, melanoma,prostate,head_and_neck,non_cancer,breast
cgcccggccaatcgagtgccttttaacaatgcgcccttaagcagatgtaagcaccgtaaggcatattgagtttttttgaagtcaacacttgaaaatcattggcagtcgttccaggcgtttcacttaacttc

SEQ ID NO: 479644 - DNA, 601 bp, Homo sapiens; identical to SEQ ID NO: 334802
  chr13:96705328-96705929
  hypo
  thyroid vs. sarcoma,ovary,bladder_and_urothelial, head_and_neck

SEQ ID NO: 479645 - DNA, 352 bp, Homo sapiens; identical to SEQ ID NO: 471618
  chr13:98869699-98870051
  hypo
  thyroid vs. melanoma,sarcoma,uterine,ovary,renal, head_and_neck,anorectal,upper_gi,non_cancer,breast

SEQ ID NO: 479646 - DNA, 220 bp, Homo sapiens; identical to SEQ ID NO: 348610
  chr13:98870098-98870318
  hypo
  thyroid vs. melanoma,sarcoma,uterine,ovary,renal, head_and_neck,anorectal,upper_gi,non_cancer,breast

SEQ ID NO: 479647 - DNA, 82 bp, Homo sapiens; identical to SEQ ID NO: 341769
  chr13:99115936-99116018
  hypo
  thyroid vs. lung,anorectal,colorectal,head_and_neck, bladder_and_urothelial,breast,upper_gi,prostate,cervical, non_cancer,multiple_myeloma,liver_bileduct,pancreas_gallbladder, sarcoma,lymphoid_neoplasm

SEQ ID NO: 479648 - DNA, 105 bp, Homo sapiens; identical to SEQ ID NO: 341771
  chr13:100068654-100068759
  hypo

SEQ ID NO: 479649 - DNA, 195 bp, Homo sapiens; identical to SEQ ID NO: 341798
  chr13:112022971-112023166
  hypo
  thyroid vs. lung,ovary,multiple_myeloma,liver_bileduct, head_and_neck,uterine

SEQ ID NO: 479650 - DNA, 319 bp, Homo sapiens; identical to SEQ ID NO: 341824
  chr13:113627865-113628184
  hypo
  thyroid vs. anorectal,cervical,pancreas_gallbladder, bladder_and_urothelial,head_and_neck,breast,non_cancer,renal

SEQ ID NO: 479651 - DNA, 206 bp, Homo sapiens; identical to SEQ ID NO: 348620
  chr13:114302352-114302558
  hypo
  thyroid vs. myeloid_neoplasm,lymphoid_neoplasm, multiple_myeloma,renal,bladder_and_urothelial,sarcoma

SEQ ID NO: 479652 - DNA, 28 bp, Homo sapiens
  chr13:114305093-114305121
  hypo
  thyroid vs. melanoma,non_cancer
ctgggaggcggcttgcttgtctgtactc

SEQ ID NO: 479653 - DNA, 98 bp, Homo sapiens; identical to SEQ ID NO: 472859
  chr13:114766173-114766271
  hypo
  thyroid vs. cervical

SEQ ID NO: 479654 - DNA, 82 bp, Homo sapiens; identical to SEQ ID NO: 380514
  chr13:114766300-114766382
  hypo
  thyroid vs. cervical

SEQ ID NO: 479655 - DNA, 219 bp, Homo sapiens; identical to SEQ ID NO: 341880
  chr13:115052309-115052528
  hypo
  thyroid vs. bladder_and_urothelial,lung,ovary, multiple_myeloma,pancreas_gallbladder,uterine,breast,upper_gi, lymphoid_neoplasm,head_and_neck,prostate

SEQ ID NO: 479656 - DNA, 528 bp, Homo sapiens; identical to SEQ ID NO: 341881
  chr14:21560027-21560555
  hypo
  thyroid vs. uterine,lung,bladder_and_urothelial,breast, cervical,head_and_neck,prostate,upper_gi,colorectal,anorectal, non_cancer,multiple_myeloma,renal,myeloid_neoplasm

SEQ ID NO: 479657 - DNA, 91 bp, Homo sapiens; identical to SEQ ID NO: 341885
  chr14:21969884-21969975
  hypo
  thyroid vs. lung,pancreas_gallbladder,head_and_neck, upper_gi,breast,bladder_and_urothelial,colorectal,uterine, lymphoid_neoplasm,cervical,sarcoma,melanoma,non_cancer,prostate, multiple_myeloma,liver_bileduct

SEQ ID NO: 479658 - DNA, 459 bp, Homo sapiens; identical to SEQ ID NO: 341906
  chr14:51171654-51172113
  hypo
  thyroid vs. sarcoma,anorectal,head_and_neck, pancreas_gallbladder,cervical,prostate,breast,uterine

SEQ ID NO: 479659 - DNA, 297 bp, Homo sapiens; identical to SEQ ID NO: 456486
  chr14:55765714-55766011
  hypo
  thyroid vs. liver_bileduct,melanoma,myeloid_neoplasm, anorectal,lymphoid_neoplasm,non_cancer,multiple_myeloma, cervical,prostate,renal,colorectal,sarcoma,upper_gi, pancreas_gallbladder,head_and_neck,bladder_and_urothelial,
  CONT. FROM ABOVE: breast,uterine

SEQ ID NO: 479660 - DNA, 55 bp, Homo sapiens; identical to SEQ ID NO: 346085
  chr14:55766084-55766139
  hypo
  thyroid vs. liver_bileduct,melanoma,myeloid_neoplasm, anorectal,lymphoid_neoplasm,non_cancer,multiple_myeloma, cervical,prostate,renal,colorectal,sarcoma,upper_gi, pancreas_gallbladder,head_and_neck,bladder_and_urothelial,
  CONT. FROM ABOVE: breast,uterine

SEQ ID NO: 479661 - DNA, 193 bp, Homo sapiens; identical to SEQ ID NO: 341914
  chr14:55817984-55818177
  hypo
  thyroid vs. liver_bileduct,sarcoma,anorectal,melanoma, prostate,cervical,upper_gi,colorectal,ovary,uterine,non_cancer, bladder_and_urothelial

SEQ ID NO: 479662 - DNA, 76 bp, Homo sapiens; identical to SEQ ID NO: 373462
  chr14:62161828-62161904
  hypo
  thyroid vs. lung

SEQ ID NO: 479663 - DNA, 101 bp, Homo sapiens; identical to SEQ ID NO: 341932
  chr14:63857003-63857104
  hypo
  thyroid vs. lung,renal,colorectal,upper_gi,head_and_neck, bladder_and_urothelial,breast,sarcoma,ovary,cervical,uterine, anorectal,prostate,lymphoid_neoplasm,pancreas_gallbladder, liver_bileduct,non_cancer,myeloid_neoplasm

SEQ ID NO: 479664 - DNA, 230 bp, Homo sapiens; identical to SEQ ID NO: 355135
  chr14:69278049-69278279
  hypo
  thyroid vs. colorectal,head_and_neck, bladder_and_urothelial,renal,breast,upper_gi,melanoma,lung, liver_bileduct,non_cancer,pancreas_gallbladder

SEQ ID NO: 479665 - DNA, 148 bp, Homo sapiens; identical to SEQ ID NO: 380585
  chr14:69345646-69345794
  hypo
  thyroid vs. liver_bileduct

SEQ ID NO: 479666 - DNA, 132 bp, Homo sapiens; identical to SEQ ID NO: 342019
  chr14:99902515-99902647
  hypo
  thyroid vs. ovary,cervical,anorectal,liver_bileduct, lymphoid_neoplasm,multiple_myeloma,pancreas_gallbladder, melanoma,head_and_neck,uterine,breast,upper_gi, bladder_and_urothelial,prostate,colorectal

SEQ ID NO: 479667 - DNA, 247 bp, Homo sapiens
  chr14:100747027-100747274
  hypo
  thyroid vs. myeloid_neoplasm
cgcaatacctgtccgtgtttccaagcagagttcaagttcatgtcttcacaagtagatgagagtcacttccagtcgggggaagcccgcctgagcagtgttttgagagtgcgtacattggaggactgccccacgtccgtttgcactctgccttgcaaaacttactgtggagacgtgtcccagactggtctcagaccagagtttgtggcacaggaaaacctggccccctaaaaagaagttttggaattgg

SEQ ID NO: 479668 - DNA, 1 bp, Homo sapiens
  chr14:100747309-100747310
  hypo
  thyroid vs. myeloid_neoplasm
c

SEQ ID NO: 479669 - DNA, 208 bp, Homo sapiens; identical to SEQ ID NO: 342027
  chr14:100748335-100748543
  hypo
  thyroid vs. upper_gi,ovary,uterine,multiple_myeloma, renal,non_cancer,prostate,breast,pancreas_gallbladder, myeloid_neoplasm,lymphoid_neoplasm,bladder_and_urothelial, liver_bileduct,colorectal,melanoma,sarcoma,head_and_neck,
  CONT. FROM ABOVE: anorectal

SEQ ID NO: 479670 - DNA, 247 bp, Homo sapiens; identical to SEQ ID NO: 342040
  chr14:102230139-102230386
  hypo
  thyroid vs. ovary,cervical,melanoma,head_and_neck,breast, uterine,liver_bileduct,renal,non_cancer,pancreas_gallbladder, bladder_and_urothelial,prostate,myeloid_neoplasm,lung

SEQ ID NO: 479671 - DNA, 72 bp, Homo sapiens; identical to SEQ ID NO: 342041
  chr14:102331847-102331919
  hypo
  thyroid vs. colorectal

SEQ ID NO: 479672 - DNA, 17 bp, Homo sapiens
  chr14:102682061-102682078
  hypo
  thyroid vs. cervical,uterine,non_cancer,sarcoma, colorectal,lymphoid_neoplasm,anorectal,multiple_myeloma, upper_gi,myeloid_neoplasm
cgtgaggttgtcctgct

SEQ ID NO: 479673 - DNA, 119 bp, Homo sapiens; identical to SEQ ID NO: 355186
  chr14:102691860-102691979
  hypo
  thyroid vs. melanoma,liver_bileduct,upper_gi,colorectal, head_and_neck

SEQ ID NO: 479674 - DNA, 367 bp, Homo sapiens; identical to SEQ ID NO: 342059
  chr14:103369461-103369828
  hypo
  thyroid vs. ovary,upper_gi,cervical,renal,head_and_neck, uterine,sarcoma,liver_bileduct,pancreas_gallbladder,breast, myeloid_neoplasm,colorectal,bladder_and_urothelial

SEQ ID NO: 479675 - DNA, 279 bp, Homo sapiens; identical to SEQ ID NO: 342063
  chr14:103423623-103423902
  hypo
  thyroid vs. colorectal,ovary,bladder_and_urothelial, uterine,breast,head_and_neck,upper_gi,cervical,prostate, non_cancer,pancreas_gallbladder,anorectal,melanoma, lymphoid_neoplasm,renal,liver_bileduct,multiple_myeloma,sarcoma,
  CONT. FROM ABOVE: lung

SEQ ID NO: 479676 - DNA, 344 bp, Homo sapiens; identical to SEQ ID NO: 380697
  chr14:103977202-103977546
  hypo
  thyroid vs. pancreas_gallbladder,cervical

SEQ ID NO: 479677 - DNA, 37 bp, Homo sapiens; identical to SEQ ID NO: 465131
  chr14:103977769-103977806
  hypo
  thyroid vs. anorectal,melanoma,upper_gi,liver_bileduct, cervical

SEQ ID NO: 479678 - DNA, 89 bp, Homo sapiens; identical to SEQ ID NO: 465132
  chr14:103977835-103977924
  hypo
  thyroid vs. anorectal,melanoma,upper_gi,liver_bileduct, cervical

SEQ ID NO: 479679 - DNA, 168 bp, Homo sapiens; identical to SEQ ID NO: 456506
  chr14:105240770-105240938
  hypo
  thyroid vs. lymphoid_neoplasm,melanoma,cervical,upper_gi, pancreas_gallbladder,non_cancer,colorectal,uterine,renal, prostate,bladder_and_urothelial

SEQ ID NO: 479680 - DNA, 133 bp, Homo sapiens; identical to SEQ ID NO: 456507
  chr14:105241177-105241310
  hypo
  thyroid vs. lymphoid_neoplasm,melanoma,cervical,upper_gi, pancreas_gallbladder,non_cancer,colorectal,uterine,renal, prostate,bladder_and_urothelial

SEQ ID NO: 479681 - DNA, 227 bp, Homo sapiens; identical to SEQ ID NO: 348648
  chr14:105241428-105241655
  hypo
  thyroid vs. lymphoid_neoplasm,melanoma,cervical,upper_gi, pancreas_gallbladder,non_cancer,colorectal,uterine,renal, prostate,bladder_and_urothelial

SEQ ID NO: 479682 - DNA, 127 bp, Homo sapiens; identical to SEQ ID NO: 342101
  chr14:105244222-105244349
  hypo
  thyroid vs. lung,pancreas_gallbladder,colorectal, multiple_myeloma,bladder_and_urothelial,prostate,head_and_neck, uterine,sarcoma,cervical,lymphoid_neoplasm,renal,upper_gi, breast,anorectal,melanoma,non_cancer

SEQ ID NO: 479683 - DNA, 423 bp, Homo sapiens; identical to SEQ ID NO: 465137
  chr14:105689521-105689944
  hypo
  thyroid vs. myeloid_neoplasm,lymphoid_neoplasm,breast, non_cancer,prostate,multiple_myeloma,sarcoma

SEQ ID NO: 479684 - DNA, 396 bp, Homo sapiens; identical to SEQ ID NO: 342114
  chr14:105728110-105728506
  hypo
  thyroid vs. multiple_myeloma,head_and_neck, bladder_and_urothelial,renal,sarcoma,breast,colorectal,melanoma, non_cancer,liver_bileduct,lymphoid_neoplasm,upper_gi,prostate, cervical

SEQ ID NO: 479685 - DNA, 162 bp, Homo sapiens; identical to SEQ ID NO: 342122
  chr15:28360064-28360226
  hypo
  thyroid vs. renal

SEQ ID NO: 479686 - DNA, 116 bp, Homo sapiens; identical to SEQ ID NO: 472885
  chr15:28516961-28517077
  hypo
  thyroid vs. breast,prostate,sarcoma,non_cancer,melanoma, upper_gi,colorectal,anorectal,uterine

SEQ ID NO: 479687 - DNA, 177 bp, Homo sapiens; identical to SEQ ID NO: 346096
  chr15:28517198-28517375
  hypo
  thyroid vs. breast,prostate,sarcoma,non_cancer,melanoma, upper_gi,colorectal,anorectal,uterine

SEQ ID NO: 479688 - DNA, 250 bp, Homo sapiens; identical to SEQ ID NO: 342134
  chr15:31561317-31561567
  hypo
  thyroid vs. cervical,renal,prostate,multiple_myeloma, lymphoid_neoplasm,non_cancer,uterine,breast,liver_bileduct, melanoma,sarcoma,pancreas_gallbladder,head_and_neck, myeloid_neoplasm

SEQ ID NO: 479689 - DNA, 225 bp, Homo sapiens; identical to SEQ ID NO: 342149
  chr15:34873206-34873431
  hypo
  thyroid vs. ovary,cervical,uterine, bladder_and_urothelial

SEQ ID NO: 479690 - DNA, 78 bp, Homo sapiens; identical to SEQ ID NO: 454799
  chr15:54191760-54191838
  hypo
  thyroid vs. renal,myeloid_neoplasm,lymphoid_neoplasm, non_cancer

SEQ ID NO: 479691 - DNA, 27 bp, Homo sapiens
  chr15:55806859-55806886
  hypo
  thyroid vs. lymphoid_neoplasm,non_cancer, myeloid_neoplasm,renal,sarcoma,cervical
gcaagggctggcaagtgtagaagtacc

SEQ ID NO: 479692 - DNA, 86 bp, Homo sapiens; identical to SEQ ID NO: 342183
  chr15:55965701-55965787
  hypo
  thyroid vs. uterine,renal,anorectal,breast,prostate, lymphoid_neoplasm,head_and_neck,sarcoma,cervical

SEQ ID NO: 479693 - DNA, 351 bp, Homo sapiens; identical to SEQ ID NO: 452903
  chr15:63795501-63795852
  hypo
  thyroid vs. myeloid_neoplasm,multiple_myeloma

SEQ ID NO: 479694 - DNA, 338 bp, Homo sapiens; identical to SEQ ID NO: 347348
  chr15:63795894-63796232
  hypo
  thyroid vs. myeloid_neoplasm,multiple_myeloma

SEQ ID NO: 479695 - DNA, 82 bp, Homo sapiens; identical to SEQ ID NO: 342219
  chr15:65242083-65242165
  hypo
  thyroid vs. melanoma,anorectal

SEQ ID NO: 479696 - DNA, 505 bp, Homo sapiens; identical to SEQ ID NO: 268065
  chr15:90611268-90611773
  hypo
  thyroid vs. uterine,pancreas_gallbladder,ovary,upper_gi, renal,bladder_and_urothelial,breast,lymphoid_neoplasm,melanoma, anorectal,colorectal

SEQ ID NO: 479697 - DNA, 364 bp, Homo sapiens; identical to SEQ ID NO: 348675
  chr15:90903993-90904357
  hypo
  thyroid vs. upper_gi,melanoma,anorectal,head_and_neck, liver_bileduct,pancreas_gallbladder,breast,prostate,renal, cervical,colorectal,non_cancer,lymphoid_neoplasm,sarcoma, bladder_and_urothelial,lung

SEQ ID NO: 479698 - DNA, 268 bp, Homo sapiens; identical to SEQ ID NO: 380931
  chr15:99482494-99482762
  hypo
  thyroid vs. head_and_neck,cervical, bladder_and_urothelial,renal,ovary,melanoma

SEQ ID NO: 479699 - DNA, 180 bp, Homo sapiens; identical to SEQ ID NO: 465153
  chr16:142447-142627
  hypo
  thyroid vs. prostate,non_cancer,colorectal,renal,uterine, upper_gi,breast,melanoma,bladder_and_urothelial

SEQ ID NO: 479700 - DNA, 358 bp, Homo sapiens; identical to SEQ ID NO: 355318
  chr16:311205-311563
  hypo
  thyroid vs. melanoma,bladder_and_urothelial,sarcoma, pancreas_gallbladder,upper_gi,uterine,cervical,breast, colorectal,non_cancer,myeloid_neoplasm,head_and_neck

SEQ ID NO: 479701 - DNA, 392 bp, Homo sapiens; identical to SEQ ID NO: 479326
  chr16:325107-325499
  hypo
  thyroid vs. ovary

SEQ ID NO: 479702 - DNA, 55 bp, Homo sapiens; identical to SEQ ID NO: 373812
  chr16:325546-325601
  hypo
  thyroid vs. ovary

SEQ ID NO: 479703 - DNA, 80 bp, Homo sapiens; identical to SEQ ID NO: 342346
  chr16:672467-672547
  hypo
  thyroid vs. anorectal,sarcoma

SEQ ID NO: 479704 - DNA, 53 bp, Homo sapiens; identical to SEQ ID NO: 342385
  chr16:1472227-1472280
  hypo
  thyroid vs. multiple_myeloma,lymphoid_neoplasm, myeloid_neoplasm,sarcoma,renal,non_cancer,melanoma

SEQ ID NO: 479705 - DNA, 135 bp, Homo sapiens; identical to SEQ ID NO: 342388
  chr16:1651481-1651616
  hypo
  thyroid vs. head_and_neck,pancreas_gallbladder,uterine, sarcoma,prostate

SEQ ID NO: 479706 - DNA, 301 bp, Homo sapiens; identical to SEQ ID NO: 342389
  chr16:1652282-1652583
  hypo
  thyroid vs. anorectal,cervical,sarcoma,ovary,uterine, bladder_and_urothelial,multiple_myeloma,non_cancer,colorectal, melanoma,head_and_neck,myeloid_neoplasm,renal,prostate, lymphoid_neoplasm

SEQ ID NO: 479707 - DNA, 90 bp, Homo sapiens; identical to SEQ ID NO: 342390
  chr16:1677046-1677136
  hypo
  thyroid vs. lung,multiple_myeloma,upper_gi, pancreas_gallbladder,head_and_neck,lymphoid_neoplasm, liver_bileduct,anorectal,colorectal,cervical, bladder_and_urothelial,breast,non_cancer,sarcoma,prostate,
  CONT. FROM ABOVE: myeloid_neoplasm,melanoma

SEQ ID NO: 479708 - DNA, 195 bp, Homo sapiens; identical to SEQ ID NO: 456532
  chr16:1730112-1730307
  hypo
  thyroid vs. myeloid_neoplasm

SEQ ID NO: 479709 - DNA, 105 bp, Homo sapiens; identical to SEQ ID NO: 346116
  chr16:1730761-1730866
  hypo
  thyroid vs. myeloid_neoplasm

SEQ ID NO: 479710 - DNA, 346 bp, Homo sapiens; identical to SEQ ID NO: 355362
  chr16:1812272-1812618
  hypo
  thyroid vs. myeloid_neoplasm

SEQ ID NO: 479711 - DNA, 184 bp, Homo sapiens; identical to SEQ ID NO: 458663
  chr16:1813299-1813483
  hypo
  thyroid vs. multiple_myeloma

SEQ ID NO: 479712 - DNA, 90 bp, Homo sapiens; identical to SEQ ID NO: 346118
  chr16:1814037-1814127
  hypo
  thyroid vs. multiple_myeloma

SEQ ID NO: 479713 - DNA, 389 bp, Homo sapiens; identical to SEQ ID NO: 453689
  chr16:2280815-2281204
  hypo
  thyroid vs. myeloid_neoplasm,colorectal,prostate,renal, breast,non_cancer

SEQ ID NO: 479714 - DNA, 238 bp, Homo sapiens; identical to SEQ ID NO: 453690
  chr16:2281402-2281640
  hypo
  thyroid vs. myeloid_neoplasm,colorectal,prostate,renal, breast,non_cancer

SEQ ID NO: 479715 - DNA, 61 bp, Homo sapiens; identical to SEQ ID NO: 346128
  chr16:2281702-2281763
  hypo
  thyroid vs. myeloid_neoplasm,colorectal,prostate,renal, breast,non_cancer

SEQ ID NO: 479716 - DNA, 810 bp, Homo sapiens; identical to SEQ ID NO: 346129
  chr16:2282326-2283136
  hypo
  thyroid vs. ovary,lung,upper_gi,head_and_neck,breast, cervical,sarcoma,bladder_and_urothelial,prostate, pancreas_gallbladder,colorectal,non_cancer,anorectal,melanoma, myeloid_neoplasm,uterine,multiple_myeloma,lymphoid_neoplasm,
  CONT. FROM ABOVE: renal,liver_bileduct

SEQ ID NO: 479717 - DNA, 512 bp, Homo sapiens; identical to SEQ ID NO: 342425
  chr16:2358246-2358758
  hypo
  thyroid vs. cervical,head_and_neck,renal,breast,prostate, ovary,lymphoid_neoplasm,uterine,sarcoma,non_cancer, pancreas_gallbladder,anorectal,melanoma,colorectal,lung

SEQ ID NO: 479718 - DNA, 395 bp, Homo sapiens; identical to SEQ ID NO: 465193
  chr16:2540434-2540829
  hypo
  thyroid vs. anorectal,cervical,melanoma,head_and_neck, non_cancer,prostate,myeloid_neoplasm,bladder_and_urothelial, liver_bileduct,pancreas_gallbladder,renal,uterine,sarcoma

SEQ ID NO: 479719 - DNA, 60 bp, Homo sapiens; identical to SEQ ID NO: 346131
  chr16:2540933-2540993
  hypo
  thyroid vs. anorectal,cervical,melanoma,head_and_neck, non_cancer,prostate,myeloid_neoplasm,bladder_and_urothelial, liver_bileduct,pancreas_gallbladder,renal,uterine,sarcoma

SEQ ID NO: 479720 - DNA, 147 bp, Homo sapiens; identical to SEQ ID NO: 355403
  chr16:3900217-3900364
  hypo
  thyroid vs. myeloid_neoplasm,bladder_and_urothelial, multiple_myeloma

SEQ ID NO: 479721 - DNA, 116 bp, Homo sapiens; identical to SEQ ID NO: 342465
  chr16:4557910-4558026
  hypo
  thyroid vs. upper_gi,cervical,ovary

SEQ ID NO: 479722 - DNA, 568 bp, Homo sapiens; identical to SEQ ID NO: 342471
  chr16:4802468-4803036
  hypo
  thyroid vs. liver_bileduct,pancreas_gallbladder,uterine, head_and_neck,upper_gi,sarcoma,anorectal,colorectal,prostate, renal,non_cancer,breast

SEQ ID NO: 479723 - DNA, 42 bp, Homo sapiens; identical to SEQ ID NO: 342484
  chr16:11037121-11037163
  hypo
  thyroid vs. multiple_myeloma

SEQ ID NO: 479724 - DNA, 66 bp, Homo sapiens
  chr16:16188327-16188393
  hypo
  thyroid vs. lung,head_and_neck,lymphoid_neoplasm, pancreas_gallbladder,renal,breast,upper_gi,ovary,sarcoma, colorectal,cervical,uterine,anorectal,prostate,non_cancer, melanoma
cgtgcatacctttgatggcctgggcgctttcaggagtgttctttttctttttcttttttttgagac

SEQ ID NO: 479725 - DNA, 150 bp, Homo sapiens; identical to SEQ ID NO: 454836
  chr16:24739345-24739495
  hypo
  thyroid vs. multiple_myeloma,lung

SEQ ID NO: 479726 - DNA, 64 bp, Homo sapiens; identical to SEQ ID NO: 342539
  chr16:28183893-28183957
  hypo
  thyroid vs. sarcoma,colorectal,upper_gi,liver_bileduct, myeloid_neoplasm,renal,bladder_and_urothelial,prostate,cervical

SEQ ID NO: 479727 - DNA, 284 bp, Homo sapiens; identical to SEQ ID NO: 342562
  chr16:31131573-31131857
  hypo
  thyroid vs. upper_gi,lung,head_and_neck, pancreas_gallbladder,prostate,bladder_and_urothelial,uterine, breast,renal,multiple_myeloma,anorectal,ovary,lymphoid_neoplasm, cervical,colorectal,sarcoma,liver_bileduct,non_cancer,melanoma,
  CONT. FROM ABOVE: myeloid_neoplasm

SEQ ID NO: 479728 - DNA, 201 bp, Homo sapiens; identical to SEQ ID NO: 456569
  chr16:31138407-31138608
  hypo
  thyroid vs. melanoma

SEQ ID NO: 479729 - DNA, 887 bp, Homo sapiens; identical to SEQ ID NO: 465222
  chr16:58030214-58031101
  hypo
  thyroid vs. sarcoma,ovary,head_and_neck,upper_gi,renal, liver_bileduct,cervical,melanoma,breast,uterine, pancreas_gallbladder,prostate,colorectal,lymphoid_neoplasm, non_cancer,bladder_and_urothelial,myeloid_neoplasm,
  CONT. FROM ABOVE: multiple_myeloma

SEQ ID NO: 479730 - DNA, 876 bp, Homo sapiens; identical to SEQ ID NO: 465223
  chr16:58030638-58031514
  hypo
  thyroid vs. ovary,renal,breast,cervical,upper_gi, lymphoid_neoplasm,sarcoma,pancreas_gallbladder,melanoma, colorectal,liver_bileduct,head_and_neck,prostate, myeloid_neoplasm,bladder_and_urothelial,uterine,non_cancer,
  CONT. FROM ABOVE: anorectal,multiple_myeloma

SEQ ID NO: 479731 - DNA, 161 bp, Homo sapiens; identical to SEQ ID NO: 342604
  chr16:67006210-67006371
  hypo
  thyroid vs. ovary

SEQ ID NO: 479732 - DNA, 37 bp, Homo sapiens; identical to SEQ ID NO: 342622
  chr16:69334756-69334793
  hypo
  thyroid vs. sarcoma

SEQ ID NO: 479733 - DNA, 96 bp, Homo sapiens; identical to SEQ ID NO: 342627
  chr16:69906932-69907028
  hypo
  thyroid vs. anorectal

SEQ ID NO: 479734 - DNA, 364 bp, Homo sapiens; identical to SEQ ID NO: 342631
  chr16:70754664-70755028
  hypo
  thyroid vs. bladder_and_urothelial

SEQ ID NO: 479735 - DNA, 116 bp, Homo sapiens; identical to SEQ ID NO: 342637
  chr16:71754757-71754873
  hypo
  thyroid vs. multiple_myeloma,lung,lymphoid_neoplasm, uterine,ovary,myeloid_neoplasm,pancreas_gallbladder,non_cancer, bladder_and_urothelial,renal,anorectal,upper_gi,breast,melanoma, colorectal,liver_bileduct,prostate,head_and_neck,cervical

SEQ ID NO: 479736 - DNA, 477 bp, Homo sapiens; identical to SEQ ID NO: 366970
  chr16:72991953-72992430
  hypo
  thyroid vs. anorectal

SEQ ID NO: 479737 - DNA, 234 bp, Homo sapiens; identical to SEQ ID NO: 342643
  chr16:74908874-74909108
  hypo
  thyroid vs. sarcoma,non_cancer,melanoma,renal,prostate

SEQ ID NO: 479738 - DNA, 110 bp, Homo sapiens; identical to SEQ ID NO: 342673
  chr16:81700929-81701039
  hypo
  thyroid vs. liver_bileduct,anorectal,breast, bladder_and_urothelial,uterine,head_and_neck,colorectal, cervical,upper_gi,melanoma

SEQ ID NO: 479739 - DNA, 543 bp, Homo sapiens; identical to SEQ ID NO: 342678
  chr16:84132267-84132810
  hypo
  thyroid vs. liver_bileduct

SEQ ID NO: 479740 - DNA, 109 bp, Homo sapiens; identical to SEQ ID NO: 342679
  chr16:84170884-84170993
  hypo
  thyroid vs. breast,anorectal

SEQ ID NO: 479741 - DNA, 133 bp, Homo sapiens; identical to SEQ ID NO: 381326
  chr16:85007919-85008052
  hypo
  thyroid vs. cervical,head_and_neck

SEQ ID NO: 479742 - DNA, 260 bp, Homo sapiens
  chr16:85671775-85672035
  hypo
  thyroid vs. myeloid_neoplasm
ctctcctctcattgtgtctcaagggtgtagtttaaaaattcaattcagacgaagctgtggcatgcgctgccctgggagaaaggctgggaaggagaggaagaggaggccctcgctgggatttatttttctggaggcgctgagacgtcttctcttcttcaaagctcagtcacccgcccaccagcgcgggccagacacccttccccagggccagcctgaccctttaacctactcacctactcactgccgaggctggggcgctt

SEQ ID NO: 479743 - DNA, 97 bp, Homo sapiens; identical to SEQ ID NO: 355514
  chr16:85672078-85672175
  hypo
  thyroid vs. myeloid_neoplasm

SEQ ID NO: 479744 - DNA, 728 bp, Homo sapiens; identical to SEQ ID NO: 342728
  chr16:87739334-87740062
  hypo
  thyroid vs. myeloid_neoplasm,multiple_myeloma,renal, head_and_neck,lymphoid_neoplasm,cervical

SEQ ID NO: 479745 - DNA, 426 bp, Homo sapiens; identical to SEQ ID NO: 342729
  chr16:87744572-87744998
  hypo
  thyroid vs. uterine

SEQ ID NO: 479746 - DNA, 151 bp, Homo sapiens
  chr16:87864425-87864576
  hypo
  thyroid vs. anorectal,prostate,melanoma
cgtgccgtcgagaggccgccggctccctgtatccttgaggcatgtccacgtcccagagcaggaggttggaacagaacggcatcccgaggacccctagccgaggcgggaaggtaagaggctgacgtcgtgcgtgggccccgccggccccagt

SEQ ID NO: 479747 - DNA, 353 bp, Homo sapiens; identical to SEQ ID NO: 355530
  chr16:88037900-88038253
  hypo
  thyroid vs. lymphoid_neoplasm,myeloid_neoplasm, colorectal,lung,liver_bileduct,head_and_neck,multiple_myeloma, renal,breast,cervical,non_cancer,bladder_and_urothelial,uterine, prostate

SEQ ID NO: 479748 - DNA, 254 bp, Homo sapiens; identical to SEQ ID NO: 342794
  chr16:89445385-89445639
  hypo
  thyroid vs. myeloid_neoplasm,uterine

SEQ ID NO: 479749 - DNA, 58 bp, Homo sapiens; identical to SEQ ID NO: 342795
  chr16:89446081-89446139
  hypo
  thyroid vs. myeloid_neoplasm

SEQ ID NO: 479750 - DNA, 64 bp, Homo sapiens; identical to SEQ ID NO: 342800
  chr16:89577046-89577110
  hypo
  thyroid vs. upper_gi

SEQ ID NO: 479751 - DNA, 312 bp, Homo sapiens
  chr16:89871397-89871709
  hypo
  thyroid vs. renal,melanoma,prostate,breast,anorectal, head_and_neck,lymphoid_neoplasm,non_cancer,multiple_myeloma, liver_bileduct
cgcgccactgtactccagcctgggcgacagaaggaagcagctgcggtcactctatgggaaaggtgaatggaaacacttaaactcatgtcaaggccgacttactagtatttccacatcagtcaagtaaaatgcaaccccacaacaggctgagactgggagtctgtcatgccaggttcccacggccacggagagacaggctgttctgcctcgcagagctcttgagagcagaaggcattatcacagatcaaaatgagttttacccaagaacccgcatcttgtcatgaacgcaccagaaagcatggccctggcgac

SEQ ID NO: 479752 - DNA, 4 bp, Homo sapiens
  chr16:89883921-89883925
  hypo
  thyroid vs. renal,myeloid_neoplasm,anorectal
cggc

SEQ ID NO: 479753 - DNA, 3 bp, Homo sapiens
  chr16:89884344-89884347
  hypo
  thyroid vs. renal,myeloid_neoplasm,anorectal
gcc

SEQ ID NO: 479754 - DNA, 25 bp, Homo sapiens
  chr16:89899939-89899964
  hypo
  thyroid vs. ovary
cgccctgctgggctcaggggcaggt

SEQ ID NO: 479755 - DNA, 307 bp, Homo sapiens; identical to SEQ ID NO: 335424
  chr17:523549-523856
  hypo
  thyroid vs. sarcoma,colorectal,upper_gi,multiple_myeloma, bladder_and_urothelial,non_cancer,anorectal,melanoma,prostate, uterine

SEQ ID NO: 479756 - DNA, 487 bp, Homo sapiens; identical to SEQ ID NO: 479334
  chr17:576348-576835
  hypo
  thyroid vs. liver_bileduct,melanoma, bladder_and_urothelial,cervical,anorectal,head_and_neck, colorectal,upper_gi,uterine,prostate

SEQ ID NO: 479757 - DNA, 138 bp, Homo sapiens; identical to SEQ ID NO: 342842
  chr17:3860438-3860576
  hypo
  thyroid vs. ovary

SEQ ID NO: 479758 - DNA, 61 bp, Homo sapiens; identical to SEQ ID NO: 355584
  chr17:7187868-7187929
  hypo
  thyroid vs. ovary,multiple_myeloma,liver_bileduct, pancreas_gallbladder,upper_gi,renal

SEQ ID NO: 479759 - DNA, 178 bp, Homo sapiens; identical to SEQ ID NO: 342871
  chr17:7806544-7806722
  hypo
  thyroid vs. sarcoma

SEQ ID NO: 479760 - DNA, 32 bp, Homo sapiens; identical to SEQ ID NO: 367165
  chr17:9154702-9154734
  hypo
  thyroid vs. uterine,ovary,head_and_neck, bladder_and_urothelial,lymphoid_neoplasm,pancreas_gallbladder

SEQ ID NO: 479761 - DNA, 209 bp, Homo sapiens; identical to SEQ ID NO: 342899
  chr17:16923475-16923684
  hypo
  thyroid vs. melanoma

SEQ ID NO: 479762 - DNA, 203 bp, Homo sapiens; identical to SEQ ID NO: 342900
  chr17:17031200-17031403
  hypo
  thyroid vs. cervical,head_and_neck

SEQ ID NO: 479763 - DNA, 56 bp, Homo sapiens; identical to SEQ ID NO: 479335
  chr17:17287170-17287226
  hypo
  thyroid vs. sarcoma

SEQ ID NO: 479764 - DNA, 14 bp, Homo sapiens
  chr17:17287254-17287268
  hypo
  thyroid vs. sarcoma
cgtggccacgcgcc

SEQ ID NO: 479765 - DNA, 410 bp, Homo sapiens; identical to SEQ ID NO: 335482
  chr17:19282076-19282486
  hypo
  thyroid vs. ovary,anorectal

SEQ ID NO: 479766 - DNA, 64 bp, Homo sapiens; identical to SEQ ID NO: 342922
  chr17:19842333-19842397
  hypo
  thyroid vs. lymphoid_neoplasm,lung,ovary,upper_gi, uterine,head_and_neck,anorectal,pancreas_gallbladder,colorectal, breast,melanoma,renal,prostate,multiple_myeloma,cervical, non_cancer,bladder_and_urothelial,sarcoma

SEQ ID NO: 479767 - DNA, 261 bp, Homo sapiens; identical to SEQ ID NO: 346160
  chr17:33344328-33344589
  hypo
  thyroid vs. bladder_and_urothelial,renal,prostate, colorectal,ovary,sarcoma,lung,uterine,liver_bileduct,cervical, pancreas_gallbladder,head_and_neck,breast,non_cancer, lymphoid_neoplasm,upper_gi,anorectal,myeloid_neoplasm

SEQ ID NO: 479768 - DNA, 841 bp, Homo sapiens; identical to SEQ ID NO: 335546
  chr17:41245464-41246305
  hypo
  thyroid vs. ovary,liver_bileduct,lung

SEQ ID NO: 479769 - DNA, 230 bp, Homo sapiens; identical to SEQ ID NO: 343001
  chr17:43180339-43180569
  hypo
  thyroid vs. anorectal,myeloid_neoplasm

SEQ ID NO: 479770 - DNA, 31 bp, Homo sapiens; identical to SEQ ID NO: 348815
  chr17:46152418-46152449
  hypo
  thyroid vs. bladder_and_urothelial,melanoma, myeloid_neoplasm,lung,liver_bileduct,pancreas_gallbladder, anorectal

SEQ ID NO: 479771 - DNA, 235 bp, Homo sapiens; identical to SEQ ID NO: 343046
  chr17:59239030-59239265
  hypo
  thyroid vs. cervical

SEQ ID NO: 479772 - DNA, 848 bp, Homo sapiens; identical to SEQ ID NO: 335648
  chr17:63555681-63556529
  hypo
  thyroid vs. ovary,uterine,sarcoma,upper_gi

SEQ ID NO: 479773 - DNA, 675 bp, Homo sapiens; identical to SEQ ID NO: 352002
  chr17:64298985-64299660
  hypo
  thyroid vs. liver_bileduct

SEQ ID NO: 479774 - DNA, 294 bp, Homo sapiens; identical to SEQ ID NO: 465289
  chr17:66420425-66420719
  hypo
  thyroid vs. sarcoma,cervical

SEQ ID NO: 479775 - DNA, 509 bp, Homo sapiens; identical to SEQ ID NO: 343082
  chr17:71281749-71282258
  hypo
  thyroid vs. multiple_myeloma

SEQ ID NO: 479776 - DNA, 207 bp, Homo sapiens; identical to SEQ ID NO: 343092
  chr17:72811689-72811896
  hypo
  thyroid vs. head_and_neck

SEQ ID NO: 479777 - DNA, 79 bp, Homo sapiens; identical to SEQ ID NO: 343093
  chr17:72823386-72823465
  hypo
  thyroid vs. melanoma,cervical,uterine, bladder_and_urothelial

SEQ ID NO: 479778 - DNA, 508 bp, Homo sapiens; identical to SEQ ID NO: 355697
  chr17:72824032-72824540
  hypo
  thyroid vs. uterine,anorectal,cervical,liver_bileduct, melanoma,renal,prostate,breast,lymphoid_neoplasm, bladder_and_urothelial,colorectal,pancreas_gallbladder, non_cancer,head_and_neck,upper_gi,sarcoma

SEQ ID NO: 479779 - DNA, 141 bp, Homo sapiens; identical to SEQ ID NO: 343103
  chr17:73242514-73242655
  hypo
  thyroid vs. pancreas_gallbladder,cervical,prostate, upper_gi,bladder_and_urothelial,colorectal,multiple_myeloma

SEQ ID NO: 479780 - DNA, 149 bp, Homo sapiens; identical to SEQ ID NO: 343110
  chr17:73635145-73635294
  hypo
  thyroid vs. sarcoma,lymphoid_neoplasm,multiple_myeloma, melanoma,prostate,bladder_and_urothelial,head_and_neck, non_cancer,myeloid_neoplasm,anorectal,cervical,breast

SEQ ID NO: 479781 - DNA, 2 bp, Homo sapiens
  chr17:73635994-73635996
  hypo
  thyroid vs. myeloid_neoplasm,multiple_myeloma,sarcoma, renal,non_cancer,lymphoid_neoplasm
cg

SEQ ID NO: 479782 - DNA, 220 bp, Homo sapiens; identical to SEQ ID NO: 343114
  chr17:73821496-73821716
  hypo
  thyroid vs. ovary,multiple_myeloma,lung

SEQ ID NO: 479783 - DNA, 264 bp, Homo sapiens; identical to SEQ ID NO: 343127
  chr17:74387398-74387662
  hypo
  thyroid vs. multiple_myeloma,head_and_neck,cervical, prostate,upper_gi,sarcoma,colorectal,breast,non_cancer,melanoma, bladder_and_urothelial,lymphoid_neoplasm,pancreas_gallbladder, lung

SEQ ID NO: 479784 - DNA, 82 bp, Homo sapiens; identical to SEQ ID NO: 477479
  chr17:74388687-74388769
  hypo
  thyroid vs. lung,liver_bileduct,lymphoid_neoplasm, multiple_myeloma,myeloid_neoplasm,head_and_neck,breast, anorectal,melanoma,prostate,cervical,bladder_and_urothelial, non_cancer

SEQ ID NO: 479785 - DNA, 119 bp, Homo sapiens; identical to SEQ ID NO: 465297
  chr17:74390245-74390364
  hypo
  thyroid vs. myeloid_neoplasm,sarcoma,non_cancer, multiple_myeloma

SEQ ID NO: 479786 - DNA, 182 bp, Homo sapiens; identical to SEQ ID NO: 348837
  chr17:74390459-74390641
  hypo
  thyroid vs. myeloid_neoplasm,sarcoma,non_cancer, multiple_myeloma

SEQ ID NO: 479787 - DNA, 331 bp, Homo sapiens; identical to SEQ ID NO: 473007
  chr17:76187077-76187408
  hypo
  thyroid vs. upper_gi,head_and_neck

SEQ ID NO: 479788 - DNA, 162 bp, Homo sapiens; identical to SEQ ID NO: 343198
  chr17:78590602-78590764
  hypo
  thyroid vs. melanoma,colorectal

SEQ ID NO: 479789 - DNA, 423 bp, Homo sapiens
  chr17:79542405-79542828
  hypo
  thyroid vs. multiple_myeloma,colorectal,uterine, anorectal,myeloid_neoplasm,melanoma
cgtgagccacagcgcccagctgacacttggtttcttaaaagcaccacttagaaaatagtccagtccgtgtgcaacgactggatgcacacagaactggcagctggcatttctcaggggccagctgtgtgcacagagccacttcgtcctcacaaacacactggtcacaggcactactgctgtccaagacaggaagggttacaaagatgagtgaacctcctaaagcaatcggcaaggacagctggacagctgtgtagagactgggccccccacactacgtgcgcaggctccccgcctcccaagtcagtgccggtgctgcagggccagggcacacgcaggcctccctcctgcctttggggaaccttgaagttgaggctcggaccccaacagccgtctcacactgagtaagactctcccacctccacc

SEQ ID NO: 479790 - DNA, 524 bp, Homo sapiens
  chr17:80445750-80446274
  hypo
  thyroid vs. myeloid_neoplasm,anorectal,renal
cgcctgagcccaggataaacttacctgtgtttatctttcaggatgcttaaatggcagaggccaagcccagactccagacggacatgcggataaggccctgctgcggcagatggaaggcatttacgctgacatccctgtgcggcgtccggagtccagtgcacacgtgcaggagctgtaccaggagtggctggaggggatcaactcccccaaggcccgagaggtgctgcataccacgtaccagagccaggagcgtggcacacacagcctggacatcaagtggtgaagtcaggccagggccttccagctgctcttggggccagagccaagagcctctcagtagagggaggggctgccctgagtggagtattaaagacacttaagaaaaccgctcaatggattactttggtttctccgagttccctgctaccccgtttattggaggcccctcaggcagtttcatgtggtgctatcttcataataggtgtgggattggaactttttttttctttttttttttttgagac

SEQ ID NO: 479791 - DNA, 478 bp, Homo sapiens; identical to SEQ ID NO: 343259
  chr17:80554494-80554972
  hypo
  thyroid vs. liver_bileduct

SEQ ID NO: 479792 - DNA, 295 bp, Homo sapiens; identical to SEQ ID NO: 343260
  chr17:80563218-80563513
  hypo
  thyroid vs. anorectal,myeloid_neoplasm,renal,prostate, bladder_and_urothelial,non_cancer,cervical,colorectal,melanoma, breast,upper_gi,sarcoma,uterine

SEQ ID NO: 479793 - DNA, 96 bp, Homo sapiens; identical to SEQ ID NO: 367487
  chr17:80762951-80763047
  hypo
  thyroid vs. liver_bileduct

SEQ ID NO: 479794 - DNA, 169 bp, Homo sapiens; identical to SEQ ID NO: 343283
  chr17:80968060-80968229
  hypo
  thyroid vs. myeloid_neoplasm,melanoma,renal, lymphoid_neoplasm,pancreas_gallbladder

SEQ ID NO: 479795 - DNA, 995 bp, Homo sapiens; identical to SEQ ID NO: 335733
  chr18:3879130-3880125
  hypo
  thyroid vs. anorectal

SEQ ID NO: 479796 - DNA, 789 bp, Homo sapiens; identical to SEQ ID NO: 355808
  chr18:8659297-8660086
  hypo
  thyroid vs. bladder_and_urothelial

SEQ ID NO: 479797 - DNA, 113 bp, Homo sapiens; identical to SEQ ID NO: 343321
  chr18:9196896-9197009
  hypo
  thyroid vs. liver_bileduct,colorectal,ovary, myeloid_neoplasm,prostate,multiple_myeloma,anorectal, pancreas_gallbladder,head_and_neck,renal,bladder_and_urothelial, non_cancer,breast,uterine,upper_gi

SEQ ID NO: 479798 - DNA, 213 bp, Homo sapiens; identical to SEQ ID NO: 479346
  chr18:12253892-12254105
  hypo

SEQ ID NO: 479799 - DNA, 83 bp, Homo sapiens
  chr18:13233060-13233143
  hypo
  thyroid vs. prostate,non_cancer,breast
cgatggcagaggatctgcttgtcgccacacacagtgcgttagggatggagcttgccaccagtggcgccacctctttgcaggcg

SEQ ID NO: 479800 - DNA, 58 bp, Homo sapiens; identical to SEQ ID NO: 367559
  chr18:13233182-13233240
  hypo
  thyroid vs. prostate,non_cancer,breast

SEQ ID NO: 479801 - DNA, 311 bp, Homo sapiens; identical to SEQ ID NO: 458751
  chr18:20911034-20911345
  hypo
  thyroid vs. melanoma

SEQ ID NO: 479802 - DNA, 61 bp, Homo sapiens
  chr18:45353804-45353865
  hypo
  thyroid vs. melanoma,uterine,renal,breast,anorectal, pancreas_gallbladder,prostate,lymphoid_neoplasm,colorectal, cervical,non_cancer
cggttagaaaaaaagcacatccctctccctctcccgtctccccccgtctcccactttctac

SEQ ID NO: 479803 - DNA, 66 bp, Homo sapiens; identical to SEQ ID NO: 343405
  chr18:60229150-60229216
  hypo
  thyroid vs. lung,liver_bileduct

SEQ ID NO: 479804 - DNA, 211 bp, Homo sapiens; identical to SEQ ID NO: 343412
  chr18:72226558-72226769
  hypo
  thyroid vs. uterine,anorectal,renal,pancreas_gallbladder, breast,head_and_neck

SEQ ID NO: 479805 - DNA, 183 bp, Homo sapiens; identical to SEQ ID NO: 343415
  chr18:72670022-72670205
  hypo
  thyroid vs. ovary

SEQ ID NO: 479806 - DNA, 227 bp, Homo sapiens; identical to SEQ ID NO: 343416
  chr18:72764607-72764834
  hypo
  thyroid vs. sarcoma,melanoma,uterine,breast, head_and_neck,renal,ovary,colorectal,pancreas_gallbladder, cervical,liver_bileduct,anorectal,non_cancer,lymphoid_neoplasm, prostate,upper_gi,bladder_and_urothelial,multiple_myeloma

SEQ ID NO: 479807 - DNA, 176 bp, Homo sapiens; identical to SEQ ID NO: 343442
  chr18:74426512-74426688
  hypo
  thyroid vs. liver_bileduct

SEQ ID NO: 479808 - DNA, 770 bp, Homo sapiens; identical to SEQ ID NO: 343490
  chr18:77358223-77358993
  hypo
  thyroid vs. myeloid_neoplasm

SEQ ID NO: 479809 - DNA, 66 bp, Homo sapiens; identical to SEQ ID NO: 355911
  chr19:491540-491606
  hypo
  thyroid vs. myeloid_neoplasm

SEQ ID NO: 479810 - DNA, 159 bp, Homo sapiens; identical to SEQ ID NO: 453776
  chr19:883424-883583
  hypo
  thyroid vs. sarcoma,melanoma,prostate,non_cancer

SEQ ID NO: 479811 - DNA, 45 bp, Homo sapiens; identical to SEQ ID NO: 453777
  chr19:884311-884356
  hypo
  thyroid vs. sarcoma,melanoma,prostate,non_cancer

SEQ ID NO: 479812 - DNA, 544 bp, Homo sapiens; identical to SEQ ID NO: 346191
  chr19:884311-884855
  hypo
  thyroid vs. sarcoma,melanoma,myeloid_neoplasm,non_cancer, prostate

SEQ ID NO: 479813 - DNA, 68 bp, Homo sapiens; identical to SEQ ID NO: 343557
  chr19:1179335-1179403
  hypo
  thyroid vs. colorectal,bladder_and_urothelial,upper_gi, uterine,breast,myeloid_neoplasm,melanoma,pancreas_gallbladder, non_cancer,liver_bileduct,lung,ovary,prostate,cervical, lymphoid_neoplasm,sarcoma

SEQ ID NO: 479814 - DNA, 343 bp, Homo sapiens; identical to SEQ ID NO: 343592
  chr19:2000558-2000901
  hypo
  thyroid vs. upper_gi,pancreas_gallbladder

SEQ ID NO: 479815 - DNA, 151 bp, Homo sapiens; identical to SEQ ID NO: 343593
  chr19:2041016-2041167
  hypo
  thyroid vs. myeloid_neoplasm

SEQ ID NO: 479816 - DNA, 783 bp, Homo sapiens; identical to SEQ ID NO: 343613
  chr19:3105574-3106357
  hypo
  thyroid vs. breast,bladder_and_urothelial,prostate,renal, uterine

SEQ ID NO: 479817 - DNA, 130 bp, Homo sapiens; identical to SEQ ID NO: 343650
  chr19:4675518-4675648
  hypo
  thyroid vs. head_and_neck,bladder_and_urothelial, melanoma,sarcoma,lung,pancreas_gallbladder,breast

SEQ ID NO: 479818 - DNA, 642 bp, Homo sapiens
  chr19:4676075-4676717
  hypo
  thyroid vs. lung,uterine,multiple_myeloma,renal,breast, cervical,liver_bileduct,melanoma,sarcoma,prostate, myeloid_neoplasm,anorectal,non_cancer,lymphoid_neoplasm, colorectal,upper_gi,head_and_neck,pancreas_gallbladder,ovary,
  CONT. FROM ABOVE: bladder_and_urothelial
cgcccggcctgtcttttaaataattatgaaaaatatccccccaaacaaaacacaaacatcaagttggggaggctggccgggggggacaggcaattgcatgcttgggtgctggggacggtggctggccgggccaggggactgagaggtcacagggagccccaggcggaaggcagcccgctcctctgagtctcttctggcctctccagtgcccatcagcgtgtgacctcctcctcccagaaggcggggagaggaggggctggcccgagaccaccatctctctgtctcggcaaccaagaagcagcggacataaaacccaagagcgtttaaaaaaggataaaaggcgtcggggcggtgaaggcagcggctcctcggggctggccagcgctgggcgggacaaagtgcctcactggggcccgcgggccactcagtccctcccgcctggttccccgcggaggctgcagccacttgtgctgtgatgtggcggctcccggtgggcaggctcagaggtattcctgtagaaagtgcagcaacgtgacttcatagtgctcgcccgactcggggcagcgaatactgtgtctctcgttggggtagatctgcggggagacaggaggcagggctggggggcgtggccggaccaccccc

SEQ ID NO: 479819 - DNA, 151 bp, Homo sapiens; identical to SEQ ID NO: 477529
  chr19:4986363-4986514
  hypo
  thyroid vs. sarcoma,anorectal,cervical,prostate, non_cancer

SEQ ID NO: 479820 - DNA, 191 bp, Homo sapiens; identical to SEQ ID NO: 367838
  chr19:4986633-4986824
  hypo
  thyroid vs. sarcoma,anorectal,cervical,prostate, non_cancer

SEQ ID NO: 479821 - DNA, 169 bp, Homo sapiens; identical to SEQ ID NO: 456706
  chr19:5023047-5023216
  hypo
  thyroid vs. myeloid_neoplasm,liver_bileduct,anorectal, colorectal,upper_gi

SEQ ID NO: 479822 - DNA, 450 bp, Homo sapiens; identical to SEQ ID NO: 348927
  chr19:5023245-5023695
  hypo
  thyroid vs. myeloid_neoplasm,liver_bileduct,anorectal, colorectal,upper_gi

SEQ ID NO: 479823 - DNA, 285 bp, Homo sapiens
  chr19:5064018-5064303
  hypo
  thyroid vs. upper_gi,bladder_and_urothelial,renal, colorectal,pancreas_gallbladder,cervical,non_cancer,melanoma, multiple_myeloma,lymphoid_neoplasm,head_and_neck,breast, prostate
cggcttgctctccttcccggcctgtgccagccacagggcagtgcgccagagccatcttgctgggtcacaggccggggccaccatagggctttgttgcgagggtggcggtcaccatggcttttccgttctgtttgcaacttggggtcccgggggcgccactggcgtttggatctgccgtggccctcctgggcttgcgtgggtggctcactctgccaggtggcctctgtccaacctgacacctggtctcgggtacttccagcgtgacgtgcacgggctctgcctccc

SEQ ID NO: 479824 - DNA, 203 bp, Homo sapiens; identical to SEQ ID NO: 355987
  chr19:5064332-5064535
  hypo
  thyroid vs. upper_gi,bladder_and_urothelial,renal, colorectal,pancreas_gallbladder,cervical,non_cancer,melanoma, multiple_myeloma,lymphoid_neoplasm,head_and_neck,breast, prostate

SEQ ID NO: 479825 - DNA, 159 bp, Homo sapiens
  chr19:5102582-5102741
  hypo
  thyroid vs. liver_bileduct,cervical,upper_gi
cggggccggggtggcatctggggccactcccggtctcttgctgttggcgttgggagggatctcgcaccacagcagggaatcgaggccccggctcccctcaggctctcccttcaccggcaatgggcggcgggcgacgggtgacgggtgacgggtgatggg

SEQ ID NO: 479826 - DNA, 110 bp, Homo sapiens; identical to SEQ ID NO: 367847
  chr19:5102770-5102880
  hypo
  thyroid vs. liver_bileduct,cervical,upper_gi

SEQ ID NO: 479827 - DNA, 303 bp, Homo sapiens; identical to SEQ ID NO: 343665
  chr19:5132575-5132878
  hypo
  thyroid vs. sarcoma,renal

SEQ ID NO: 479828 - DNA, 202 bp, Homo sapiens; identical to SEQ ID NO: 367873
  chr19:6226077-6226279
  hypo
  thyroid vs. liver_bileduct,pancreas_gallbladder

SEQ ID NO: 479829 - DNA, 87 bp, Homo sapiens
  chr19:8004774-8004861
  hypo
  thyroid vs. lung,upper_gi,head_and_neck,prostate,sarcoma, breast,ovary,colorectal,melanoma,cervical,pancreas_gallbladder, uterine,bladder_and_urothelial,non_cancer,renal
cgacagagtgagactctgtttcaaaaaaacaacagagaaacagtttaatgaatgatcatacaataatccaatcaggcggaaggggcc

SEQ ID NO: 479830 - DNA, 71 bp, Homo sapiens; identical to SEQ ID NO: 356005
  chr19:8463144-8463215
  hypo
  thyroid vs. cervical,multiple_myeloma,melanoma, colorectal,bladder_and_urothelial,lymphoid_neoplasm,lung, myeloid_neoplasm

SEQ ID NO: 479831 - DNA, 764 bp, Homo sapiens; identical to SEQ ID NO: 461749
  chr19:8576026-8576790
  hypo
  thyroid vs. uterine

SEQ ID NO: 479832 - DNA, 61 bp, Homo sapiens; identical to SEQ ID NO: 461750
  chr19:10370250-10370311
  hypo
  thyroid vs. melanoma

SEQ ID NO: 479833 - DNA, 88 bp, Homo sapiens; identical to SEQ ID NO: 348939
  chr19:10370575-10370663
  hypo
  thyroid vs. melanoma

SEQ ID NO: 479834 - DNA, 74 bp, Homo sapiens; identical to SEQ ID NO: 343736
  chr19:10687853-10687927
  hypo
  thyroid vs. bladder_and_urothelial,prostate

SEQ ID NO: 479835 - DNA, 52 bp, Homo sapiens; identical to SEQ ID NO: 343745
  chr19:10941853-10941905
  hypo
  thyroid vs. bladder_and_urothelial

SEQ ID NO: 479836 - DNA, 461 bp, Homo sapiens; identical to SEQ ID NO: 343796
  chr19:14263414-14263875
  hypo
  thyroid vs. ovary,bladder_and_urothelial,cervical, pancreas_gallbladder

SEQ ID NO: 479837 - DNA, 345 bp, Homo sapiens; identical to SEQ ID NO: 343802
  chr19:15073023-15073368
  hypo
  thyroid vs. pancreas_gallbladder

SEQ ID NO: 479838 - DNA, 168 bp, Homo sapiens; identical to SEQ ID NO: 343820
  chr19:16661967-16662135
  hypo

SEQ ID NO: 479839 - DNA, 1 bp, Homo sapiens
  chr19:18054252-18054253
  hypo
  thyroid vs. liver_bileduct
c

SEQ ID NO: 479840 - DNA, 10 bp, Homo sapiens
  chr19:18055035-18055045
  hypo
  thyroid vs. liver_bileduct
aggtggaggc

SEQ ID NO: 479841 - DNA, 207 bp, Homo sapiens; identical to SEQ ID NO: 343850
  chr19:18757941-18758148
  hypo
  thyroid vs. anorectal,myeloid_neoplasm,melanoma,prostate, lymphoid_neoplasm,head_and_neck,pancreas_gallbladder,breast, cervical,upper_gi,non_cancer,uterine,bladder_and_urothelial, renal

SEQ ID NO: 479842 - DNA, 301 bp, Homo sapiens; identical to SEQ ID NO: 343853
  chr19:18836823-18837124
  hypo
  thyroid vs. anorectal,liver_bileduct,renal,colorectal, upper_gi,non_cancer,lymphoid_neoplasm,bladder_and_urothelial, head_and_neck,breast,prostate,uterine,pancreas_gallbladder

SEQ ID NO: 479843 - DNA, 165 bp, Homo sapiens; identical to SEQ ID NO: 343859
  chr19:18963604-18963769
  hypo

SEQ ID NO: 479844 - DNA, 270 bp, Homo sapiens; identical to SEQ ID NO: 343867
  chr19:19576172-19576442
  hypo
  thyroid vs. sarcoma,melanoma,pancreas_gallbladder, uterine,head_and_neck,renal,myeloid_neoplasm,prostate, colorectal,lung,anorectal,lymphoid_neoplasm, bladder_and_urothelial,liver_bileduct,non_cancer

SEQ ID NO: 479845 - DNA, 259 bp, Homo sapiens; identical to SEQ ID NO: 368022
  chr19:19636907-19637166
  hypo
  thyroid vs. renal,bladder_and_urothelial,sarcoma, liver_bileduct

SEQ ID NO: 479846 - DNA, 149 bp, Homo sapiens; identical to SEQ ID NO: 343872
  chr19:19719325-19719474
  hypo
  thyroid vs. head_and_neck

SEQ ID NO: 479847 - DNA, 62 bp, Homo sapiens; identical to SEQ ID NO: 343891
  chr19:30502063-30502125
  hypo
  thyroid vs. anorectal,uterine,head_and_neck,lung

SEQ ID NO: 479848 - DNA, 234 bp, Homo sapiens; identical to SEQ ID NO: 466807
  chr19:31841177-31841411
  hypo
  thyroid vs. ovary

SEQ ID NO: 479849 - DNA, 38 bp, Homo sapiens; identical to SEQ ID NO: 343904
  chr19:32849484-32849522
  hypo
  thyroid vs. liver_bileduct,uterine,lymphoid_neoplasm, pancreas_gallbladder,melanoma,multiple_myeloma,upper_gi, colorectal,non_cancer,cervical,head_and_neck

SEQ ID NO: 479850 - DNA, 478 bp, Homo sapiens; identical to SEQ ID NO: 343927
  chr19:36042055-36042533
  hypo
  thyroid vs. ovary,sarcoma,renal

SEQ ID NO: 479851 - DNA, 193 bp, Homo sapiens; identical to SEQ ID NO: 460218
  chr19:39151314-39151507
  hypo
  thyroid vs. melanoma

SEQ ID NO: 479852 - DNA, 244 bp, Homo sapiens; identical to SEQ ID NO: 460219
  chr19:39151540-39151784
  hypo
  thyroid vs. melanoma

SEQ ID NO: 479853 - DNA, 301 bp, Homo sapiens; identical to SEQ ID NO: 343977
  chr19:40753417-40753718
  hypo
  thyroid vs. bladder_and_urothelial,head_and_neck,uterine, melanoma,ovary,lung,upper_gi,renal,pancreas_gallbladder,breast, liver_bileduct,myeloid_neoplasm,colorectal,cervical,prostate, non_cancer,lymphoid_neoplasm,multiple_myeloma,sarcoma

SEQ ID NO: 479854 - DNA, 804 bp, Homo sapiens; identical to SEQ ID NO: 479362
  chr19:45647694-45648498
  hypo
  thyroid vs. bladder_and_urothelial,sarcoma,renal, lymphoid_neoplasm,upper_gi,anorectal,liver_bileduct, head_and_neck,colorectal

SEQ ID NO: 479855 - DNA, 802 bp, Homo sapiens; identical to SEQ ID NO: 347608
  chr19:45648009-45648811
  hypo
  thyroid vs. pancreas_gallbladder,bladder_and_urothelial, cervical,head_and_neck,anorectal,uterine,renal,upper_gi,ovary, lymphoid_neoplasm,sarcoma,multiple_myeloma,non_cancer,prostate, colorectal,breast,melanoma,liver_bileduct,myeloid_neoplasm

SEQ ID NO: 479856 - DNA, 41 bp, Homo sapiens
  chr19:46307556-46307597
  hypo
  thyroid vs. sarcoma,renal,prostate,breast,non_cancer, cervical
cgaccagctccagcacggggatgccctcgaagtccgggttc

SEQ ID NO: 479857 - DNA, 39 bp, Homo sapiens; identical to SEQ ID NO: 356169
  chr19:46308096-46308135
  hypo
  thyroid vs. sarcoma,renal,prostate,breast,non_cancer, cervical

SEQ ID NO: 479858 - DNA, 112 bp, Homo sapiens; identical to SEQ ID NO: 344031
  chr19:47646754-47646866
  hypo
  thyroid vs. multiple_myeloma,myeloid_neoplasm,anorectal, lymphoid_neoplasm,melanoma,non_cancer,renal

SEQ ID NO: 479859 - DNA, 83 bp, Homo sapiens; identical to SEQ ID NO: 336190
  chr19:47676020-47676103
  hypo
  thyroid vs. liver_bileduct

SEQ ID NO: 479860 - DNA, 122 bp, Homo sapiens; identical to SEQ ID NO: 465402
  chr19:50129561-50129683
  hypo
  thyroid vs. cervical,anorectal,melanoma,sarcoma,renal, non_cancer,uterine,bladder_and_urothelial,prostate

SEQ ID NO: 479861 - DNA, 30 bp, Homo sapiens; identical to SEQ ID NO: 465403
  chr19:50129741-50129771
  hypo
  thyroid vs. cervical,anorectal,melanoma,sarcoma,renal, non_cancer,uterine,bladder_and_urothelial,prostate

SEQ ID NO: 479862 - DNA, 57 bp, Homo sapiens; identical to SEQ ID NO: 344057
  chr19:50130742-50130799
  hypo
  thyroid vs. anorectal

SEQ ID NO: 479863 - DNA, 767 bp, Homo sapiens; identical to SEQ ID NO: 356201
  chr19:51020756-51021523
  hypo
  thyroid vs. sarcoma,liver_bileduct,renal,anorectal, uterine,lung,prostate,breast,lymphoid_neoplasm,myeloid_neoplasm, colorectal,bladder_and_urothelial,head_and_neck, pancreas_gallbladder,non_cancer,melanoma

SEQ ID NO: 479864 - DNA, 985 bp, Homo sapiens
  chr19:51021033-51022018
  hypo
cgcccacaccacccccactggccacggcggccgcggcggccacggacacggccgaggcggcgggcagctcgtcctccacgttgatgatctccacggtgcgcgtgggcccgtggtgcttgtggagctggtgctgcttgcgcagcttgtagaaggccacgagcatcaccgcggccatgaacgtgatggccacgaagcagccgatgatgattttggtggtcttcatgacgtcgtccaggtccttgagggcgttctccgtcacatccgtgatgggcaccgtgaacgccttctccgtgggccgcgaggagcgcggggcgggtgccgtggtagaagacgaggcagggccggccgcgtccccaggccggcccccaccccagacaccgtctgtcgtgggccctggcggttccttctccgtcccccgcggctgcagggcctcctctccgggctgcgtctccagggtctccacggtcaccgtggtgaagtaggtgtagccgccactgccccctccaacaccaccactgcccccagggccgcccccgccgctgccggtgcccccggccgccacggggtccacggccgagacgttgagcgtggccgaggcggtggtgttgccggctgagttcgtcaccatgcacgtgtactggcccgtgtcctgcacggtgacgttggtgaagttaagcgtgccgtcatgcaggacggagatgcgcacgcggtaggagccgtgggtcatgagggtgccgttgggcgtcagccagttgacggaggtcatggaggtgcccgtgcggcatttgagctcggcagccatgccctcggtgacgttgaggtccgtgggcggctccacgatgacgggcgcatagcaggtgaaatgcgactggtccagctccccaatgtagcgccccttgaggccggcgggcgcatgacagcgggcgcagcacgtcgtgttgctgggcaccgtctccttgagccaccagctcagccagagcacgtc

SEQ ID NO: 479865 - DNA, 386 bp, Homo sapiens; identical to SEQ ID NO: 356217
  chr19:55990556-55990942
  hypo
  thyroid vs. breast,cervical,colorectal,anorectal, upper_gi,head_and_neck,bladder_and_urothelial,lung,renal, prostate,lymphoid_neoplasm,non_cancer,melanoma,liver_bileduct

SEQ ID NO: 479866 - DNA, 70 bp, Homo sapiens; identical to SEQ ID NO: 344109
  chr19:56104277-56104347
  hypo
  thyroid vs. ovary

SEQ ID NO: 479867 - DNA, 94 bp, Homo sapiens; identical to SEQ ID NO: 353047
  chr2:3294552-3294646
  hypo
  thyroid vs. myeloid_neoplasm,pancreas_gallbladder, melanoma,upper_gi,bladder_and_urothelial,lung,head_and_neck, sarcoma,liver_bileduct,multiple_myeloma,breast,uterine,prostate, colorectal,renal

SEQ ID NO: 479868 - DNA, 205 bp, Homo sapiens; identical to SEQ ID NO: 471967
  chr2:3352473-3352678
  hypo
  thyroid vs. melanoma,lymphoid_neoplasm

SEQ ID NO: 479869 - DNA, 293 bp, Homo sapiens; identical to SEQ ID NO: 376210
  chr2:3352710-3353003
  hypo
  thyroid vs. melanoma,lymphoid_neoplasm

SEQ ID NO: 479870 - DNA, 488 bp, Homo sapiens; identical to SEQ ID NO: 345732
  chr2:3418350-3418838
  hypo
  thyroid vs. lymphoid_neoplasm,multiple_myeloma, liver_bileduct,melanoma,colorectal,prostate,non_cancer,upper_gi, breast,head_and_neck,anorectal,lung,pancreas_gallbladder, cervical,bladder_and_urothelial,uterine,myeloid_neoplasm,
  CONT. FROM ABOVE: sarcoma

SEQ ID NO: 479871 - DNA, 289 bp, Homo sapiens; identical to SEQ ID NO: 337495
  chr2:3469110-3469399
  hypo
  thyroid vs. ovary,uterine

SEQ ID NO: 479872 - DNA, 614 bp, Homo sapiens; identical to SEQ ID NO: 337537
  chr2:10334473-10335087
  hypo
  thyroid vs. cervical,upper_gi,breast,melanoma, pancreas_gallbladder,non_cancer,prostate,anorectal, head_and_neck,colorectal,lung,bladder_and_urothelial, multiple_myeloma,liver_bileduct

SEQ ID NO: 479873 - DNA, 243 bp, Homo sapiens; identical to SEQ ID NO: 357127
  chr2:24714924-24715167
  hypo
  thyroid vs. ovary

SEQ ID NO: 479874 - DNA, 252 bp, Homo sapiens; identical to SEQ ID NO: 337569
  chr2:25075413-25075665
  hypo
  thyroid vs. ovary,head_and_neck,anorectal,sarcoma,renal, breast,pancreas_gallbladder,colorectal,upper_gi,prostate, bladder_and_urothelial,cervical,lung,lymphoid_neoplasm,uterine

SEQ ID NO: 479875 - DNA, 35 bp, Homo sapiens; identical to SEQ ID NO: 337576
  chr2:26688538-26688573
  hypo
  thyroid vs. ovary,sarcoma

SEQ ID NO: 479876 - DNA, 446 bp, Homo sapiens; identical to SEQ ID NO: 337577
  chr2:26986225-26986671
  hypo
  thyroid vs. anorectal,cervical,sarcoma,head_and_neck, breast,prostate

SEQ ID NO: 479877 - DNA, 204 bp, Homo sapiens; identical to SEQ ID NO: 353097
  chr2:38742658-38742862
  hypo
  thyroid vs. multiple_myeloma,lymphoid_neoplasm, myeloid_neoplasm,non_cancer

SEQ ID NO: 479878 - DNA, 199 bp, Homo sapiens; identical to SEQ ID NO: 331262
  chr2:39663585-39663784
  hypo
  thyroid vs. sarcoma

SEQ ID NO: 479879 - DNA, 25 bp, Homo sapiens
  chr2:43413645-43413670
  hypo
  thyroid vs. uterine,cervical,sarcoma,prostate,non_cancer, renal
cgcttctaacagagtcccaggtgac

SEQ ID NO: 479880 - DNA, 16 bp, Homo sapiens
  chr2:43413699-43413715
  hypo
  thyroid vs. uterine,cervical,sarcoma,prostate,non_cancer, renal
ccgagaagaccttagc

SEQ ID NO: 479881 - DNA, 686 bp, Homo sapiens; identical to SEQ ID NO: 337611
  chr2:44553759-44554445
  hypo
  thyroid vs. melanoma

SEQ ID NO: 479882 - DNA, 218 bp, Homo sapiens; identical to SEQ ID NO: 337654
  chr2:74327579-74327797
  hypo
  thyroid vs. ovary,breast,head_and_neck,uterine,cervical, prostate,pancreas_gallbladder,sarcoma,multiple_myeloma,melanoma, non_cancer,anorectal,bladder_and_urothelial,colorectal, myeloid_neoplasm,renal,upper_gi,liver_bileduct,
  CONT. FROM ABOVE: lymphoid_neoplasm

SEQ ID NO: 479883 - DNA, 104 bp, Homo sapiens; identical to SEQ ID NO: 337662
  chr2:85356682-85356786
  hypo
  thyroid vs. lymphoid_neoplasm,renal,uterine,non_cancer, upper_gi,pancreas_gallbladder,prostate,cervical, myeloid_neoplasm,sarcoma,colorectal,breast,lung,melanoma, head_and_neck,liver_bileduct,anorectal

SEQ ID NO: 479884 - DNA, 572 bp, Homo sapiens; identical to SEQ ID NO: 337691
  chr2:98408820-98409392
  hypo
  thyroid vs. renal,bladder_and_urothelial,ovary,anorectal, upper_gi,head_and_neck,liver_bileduct,uterine,prostate,breast, colorectal,lung,cervical,melanoma,pancreas_gallbladder

SEQ ID NO: 479885 - DNA, 56 bp, Homo sapiens; identical to SEQ ID NO: 337732
  chr2:118736298-118736354
  hypo
  thyroid vs. lung,ovary

SEQ ID NO: 479886 - DNA, 223 bp, Homo sapiens; identical to SEQ ID NO: 337741
  chr2:121108610-121108833
  hypo
  thyroid vs. anorectal

SEQ ID NO: 479887 - DNA, 248 bp, Homo sapiens; identical to SEQ ID NO: 337747
  chr2:122094622-122094870
  hypo
  thyroid vs. anorectal,melanoma,breast,colorectal

SEQ ID NO: 479888 - DNA, 174 bp, Homo sapiens; identical to SEQ ID NO: 337769
  chr2:132269055-132269229
  hypo
  thyroid vs. sarcoma,upper_gi,prostate,head_and_neck

SEQ ID NO: 479889 - DNA, 268 bp, Homo sapiens; identical to SEQ ID NO: 337770
  chr2:132270135-132270403
  hypo
  thyroid vs. anorectal,cervical

SEQ ID NO: 479890 - DNA, 125 bp, Homo sapiens; identical to SEQ ID NO: 337792
  chr2:159528162-159528287
  hypo
  thyroid vs. anorectal,colorectal,ovary,uterine, bladder_and_urothelial,prostate,lung,melanoma,breast,cervical, head_and_neck,renal,non_cancer,upper_gi,liver_bileduct, pancreas_gallbladder,sarcoma,myeloid_neoplasm,lymphoid_neoplasm

SEQ ID NO: 479891 - DNA, 133 bp, Homo sapiens; identical to SEQ ID NO: 337806
  chr2:171730981-171731114
  hypo
  thyroid vs. anorectal

SEQ ID NO: 479892 - DNA, 81 bp, Homo sapiens; identical to SEQ ID NO: 337813
  chr2:175431799-175431880
  hypo
  thyroid vs. sarcoma

SEQ ID NO: 479893 - DNA, 302 bp, Homo sapiens; identical to SEQ ID NO: 337861
  chr2:219145053-219145355
  hypo
  thyroid vs. anorectal,bladder_and_urothelial, liver_bileduct,colorectal,uterine,myeloid_neoplasm, head_and_neck,lung,upper_gi,breast,prostate,non_cancer,melanoma, cervical,renal,sarcoma,pancreas_gallbladder

SEQ ID NO: 479894 - DNA, 372 bp, Homo sapiens; identical to SEQ ID NO: 331638
  chr2:224808923-224809295
  hypo
  thyroid vs. ovary,pancreas_gallbladder

SEQ ID NO: 479895 - DNA, 54 bp, Homo sapiens; identical to SEQ ID NO: 337892
  chr2:231977489-231977543
  hypo
  thyroid vs. ovary,uterine,liver_bileduct,breast, anorectal,colorectal,lymphoid_neoplasm,pancreas_gallbladder, renal,prostate

SEQ ID NO: 479896 - DNA, 168 bp, Homo sapiens; identical to SEQ ID NO: 337913
  chr2:236603384-236603552
  hypo
  thyroid vs. ovary,multiple_myeloma,liver_bileduct, melanoma

SEQ ID NO: 479897 - DNA, 34 bp, Homo sapiens; identical to SEQ ID NO: 337934
  chr2:238934785-238934819
  hypo
  thyroid vs. lung,pancreas_gallbladder,breast, liver_bileduct,prostate,lymphoid_neoplasm,cervical,upper_gi, uterine,non_cancer,colorectal,melanoma,multiple_myeloma, bladder_and_urothelial,myeloid_neoplasm,sarcoma

SEQ ID NO: 479898 - DNA, 270 bp, Homo sapiens; identical to SEQ ID NO: 345782
  chr2:239074309-239074579
  hypo
  thyroid vs. liver_bileduct,bladder_and_urothelial, pancreas_gallbladder,lung,melanoma,breast,prostate,non_cancer, head_and_neck,uterine,renal,cervical,upper_gi,multiple_myeloma, colorectal,ovary,sarcoma

SEQ ID NO: 479899 - DNA, 67 bp, Homo sapiens; identical to SEQ ID NO: 347954
  chr2:239082208-239082275
  hypo
  thyroid vs. multiple_myeloma,sarcoma,prostate,breast, liver_bileduct,renal,non_cancer,cervical,myeloid_neoplasm, upper_gi,bladder_and_urothelial,pancreas_gallbladder,melanoma

SEQ ID NO: 479900 - DNA, 43 bp, Homo sapiens
  chr2:239083093-239083136
  hypo
  thyroid vs. ovary,uterine,pancreas_gallbladder,upper_gi, breast,prostate,liver_bileduct,colorectal,sarcoma,non_cancer, lymphoid_neoplasm,renal,multiple_myeloma,cervical, bladder_and_urothelial,head_and_neck,melanoma,myeloid_neoplasm,
  CONT. FROM ABOVE: anorectal
cgtgtgagagagcactccgcaaatgccacggctgcgcatgggc

SEQ ID NO: 479901 - DNA, 26 bp, Homo sapiens
  chr2:239083165-239083191
  hypo
  thyroid vs. ovary,uterine,pancreas_gallbladder,upper_gi, breast,prostate,liver_bileduct,colorectal,sarcoma,non_cancer, lymphoid_neoplasm,renal,multiple_myeloma,cervical, bladder_and_urothelial,head_and_neck,melanoma,myeloid_neoplasm,
  CONT. FROM ABOVE: anorectal
atggaccaagcaagttcaggagatgc

SEQ ID NO: 479902 - DNA, 244 bp, Homo sapiens; identical to SEQ ID NO: 337971
  chr2:241286564-241286808
  hypo
  thyroid vs. anorectal

SEQ ID NO: 479903 - DNA, 463 bp, Homo sapiens; identical to SEQ ID NO: 455098
  chr2:242004407-242004870
  hypo
  thyroid vs. sarcoma,prostate,breast,non_cancer,melanoma

SEQ ID NO: 479904 - DNA, 172 bp, Homo sapiens
  chr2:242009173-242009345
  hypo
  thyroid vs. ovary
cgtgccagcccacaccccgcctcggcactgtaccattctccataataaagaatctggcttccagcaaggctgcggcagcccatgtccggttctcaaaccgtgttcttgccagaagaccctgtgggcaccccctcacctctccctgctcctgcctcatccagggcccctgcct

SEQ ID NO: 479905 - DNA, 339 bp, Homo sapiens; identical to SEQ ID NO: 337986
  chr2:242169887-242170226
  hypo
  thyroid vs. head_and_neck

SEQ ID NO: 479906 - DNA, 326 bp, Homo sapiens; identical to SEQ ID NO: 337992
  chr2:242440848-242441174
  hypo
  thyroid vs. multiple_myeloma,upper_gi,ovary,uterine, head_and_neck,cervical,liver_bileduct,sarcoma,melanoma, colorectal,renal,breast,bladder_and_urothelial, lymphoid_neoplasm,myeloid_neoplasm,pancreas_gallbladder,
  CONT. FROM ABOVE: non_cancer,anorectal,prostate,lung

SEQ ID NO: 479907 - DNA, 2 bp, Homo sapiens
  chr20:23969236-23969238
  hypo
  thyroid vs. ovary,sarcoma,uterine,anorectal, pancreas_gallbladder,head_and_neck,renal,lymphoid_neoplasm, cervical,bladder_and_urothelial,prostate,myeloid_neoplasm, breast,melanoma,non_cancer,colorectal
cg

SEQ ID NO: 479908 - DNA, 112 bp, Homo sapiens; identical to SEQ ID NO: 219885
  chr20:23969320-23969432
  hypo
  thyroid vs. ovary,sarcoma,uterine,anorectal, pancreas_gallbladder,head_and_neck,renal,lymphoid_neoplasm, cervical,bladder_and_urothelial,prostate,myeloid_neoplasm, breast,melanoma,non_cancer,colorectal

SEQ ID NO: 479909 - DNA, 237 bp, Homo sapiens; identical to SEQ ID NO: 344211
  chr20:32436267-32436504
  hypo
  thyroid vs. pancreas_gallbladder,non_cancer,breast,ovary, renal,cervical,prostate,anorectal,bladder_and_urothelial, head_and_neck,sarcoma,upper_gi,lymphoid_neoplasm,uterine, colorectal,liver_bileduct,melanoma,multiple_myeloma,
  CONT. FROM ABOVE: myeloid_neoplasm,lung

SEQ ID NO: 479910 - DNA, 32 bp, Homo sapiens; identical to SEQ ID NO: 465483
  chr20:32677630-32677662
  hypo
  thyroid vs. multiple_myeloma,liver_bileduct,colorectal, myeloid_neoplasm

SEQ ID NO: 479911 - DNA, 205 bp, Homo sapiens; identical to SEQ ID NO: 368318
  chr20:32677691-32677896
  hypo
  thyroid vs. multiple_myeloma,liver_bileduct,colorectal, myeloid_neoplasm

SEQ ID NO: 479912 - DNA, 138 bp, Homo sapiens; identical to SEQ ID NO: 477614
  chr20:33183813-33183951
  hypo
  thyroid vs. pancreas_gallbladder,liver_bileduct,prostate, upper_gi,non_cancer,lymphoid_neoplasm,colorectal, multiple_myeloma,myeloid_neoplasm,breast

SEQ ID NO: 479913 - DNA, 86 bp, Homo sapiens; identical to SEQ ID NO: 344218
  chr20:33876250-33876336
  hypo
  thyroid vs. anorectal,uterine,renal,breast

SEQ ID NO: 479914 - DNA, 436 bp, Homo sapiens; identical to SEQ ID NO: 473181
  chr20:35443740-35444176
  hypo
  thyroid vs. anorectal,liver_bileduct,lymphoid_neoplasm, colorectal,lung,melanoma,pancreas_gallbladder,head_and_neck, breast,non_cancer,multiple_myeloma,upper_gi,cervical, bladder_and_urothelial,prostate,sarcoma,uterine,renal,
  CONT. FROM ABOVE: myeloid_neoplasm

SEQ ID NO: 479915 - DNA, 381 bp, Homo sapiens; identical to SEQ ID NO: 346230
  chr20:35444205-35444586
  hypo
  thyroid vs. anorectal,liver_bileduct,lymphoid_neoplasm, colorectal,lung,melanoma,pancreas_gallbladder,head_and_neck, breast,non_cancer,multiple_myeloma,upper_gi,cervical, bladder_and_urothelial,prostate,sarcoma,uterine,renal,
  CONT. FROM ABOVE: myeloid_neoplasm

SEQ ID NO: 479916 - DNA, 234 bp, Homo sapiens; identical to SEQ ID NO: 461856
  chr20:40020340-40020574
  hypo
  thyroid vs. melanoma,renal

SEQ ID NO: 479917 - DNA, 67 bp, Homo sapiens; identical to SEQ ID NO: 344270
  chr20:47765244-47765311
  hypo
  thyroid vs. myeloid_neoplasm,lymphoid_neoplasm,cervical, colorectal,bladder_and_urothelial,anorectal,breast,uterine, renal,non_cancer,melanoma

SEQ ID NO: 479918 - DNA, 50 bp, Homo sapiens; identical to SEQ ID NO: 356294
  chr20:47766299-47766349
  hypo
  thyroid vs. upper_gi,cervical,breast,melanoma, bladder_and_urothelial,head_and_neck,colorectal,liver_bileduct, non_cancer

SEQ ID NO: 479919 - DNA, 75 bp, Homo sapiens
  chr20:48350342-48350417
  hypo
  thyroid vs. lymphoid_neoplasm,sarcoma,renal,breast, myeloid_neoplasm
cggccgtttacaatactttctaaaacaatgtaggtagagaagagggctaattataatcaaacaaacaaaggtaac

SEQ ID NO: 479920 - DNA, 522 bp, Homo sapiens; identical to SEQ ID NO: 346235
  chr20:48498752-48499274
  hypo
  thyroid vs. lung,ovary,liver_bileduct,head_and_neck, upper_gi,bladder_and_urothelial,colorectal,uterine,prostate, breast,melanoma,lymphoid_neoplasm,cervical,non_cancer, pancreas_gallbladder,renal,multiple_myeloma,anorectal,
  CONT. FROM ABOVE: myeloid_neoplasm

SEQ ID NO: 479921 - DNA, 242 bp, Homo sapiens; identical to SEQ ID NO: 356304
  chr20:49206898-49207140
  hypo
  thyroid vs. bladder_and_urothelial,uterine,renal

SEQ ID NO: 479922 - DNA, 18 bp, Homo sapiens
  chr20:49286725-49286743
  hypo
  thyroid vs. myeloid_neoplasm
cgctctgagccaaggtag

SEQ ID NO: 479923 - DNA, 64 bp, Homo sapiens; identical to SEQ ID NO: 344314
  chr20:56999390-56999454
  hypo
  thyroid vs. anorectal,lymphoid_neoplasm, bladder_and_urothelial,head_and_neck,prostate, pancreas_gallbladder,non_cancer,cervical,breast,renal,uterine

SEQ ID NO: 479924 - DNA, 305 bp, Homo sapiens; identical to SEQ ID NO: 375164
  chr20:57415535-57415840
  hypo
  thyroid vs. liver_bileduct

SEQ ID NO: 479925 - DNA, 128 bp, Homo sapiens; identical to SEQ ID NO: 368439
  chr20:60756218-60756346
  hypo
  thyroid vs. melanoma

SEQ ID NO: 479926 - DNA, 227 bp, Homo sapiens; identical to SEQ ID NO: 344409
  chr20:62242319-62242546
  hypo
  thyroid vs. sarcoma,bladder_and_urothelial,renal, melanoma,ovary,uterine,upper_gi,breast,cervical, pancreas_gallbladder,head_and_neck,anorectal,colorectal, lymphoid_neoplasm,non_cancer

SEQ ID NO: 479927 - DNA, 357 bp, Homo sapiens; identical to SEQ ID NO: 344411
  chr20:62252093-62252450
  hypo
  thyroid vs. renal,non_cancer,lymphoid_neoplasm,sarcoma, myeloid_neoplasm,cervical,uterine,pancreas_gallbladder, liver_bileduct,bladder_and_urothelial,colorectal,breast

SEQ ID NO: 479928 - DNA, 73 bp, Homo sapiens; identical to SEQ ID NO: 344433
  chr20:62639433-62639506
  hypo
  thyroid vs. lung,pancreas_gallbladder

SEQ ID NO: 479929 - DNA, 53 bp, Homo sapiens; identical to SEQ ID NO: 344452
  chr21:34033597-34033650
  hypo
  thyroid vs. lymphoid_neoplasm,sarcoma,melanoma, non_cancer,multiple_myeloma,renal,cervical,myeloid_neoplasm

SEQ ID NO: 479930 - DNA, 157 bp, Homo sapiens; identical to SEQ ID NO: 383165
  chr21:34350777-34350934
  hypo
  thyroid vs. anorectal

SEQ ID NO: 479931 - DNA, 749 bp, Homo sapiens; identical to SEQ ID NO: 344480
  chr21:40316188-40316937
  hypo
  thyroid vs. ovary,bladder_and_urothelial

SEQ ID NO: 479932 - DNA, 51 bp, Homo sapiens; identical to SEQ ID NO: 344484
  chr21:40580603-40580654
  hypo
  thyroid vs. head_and_neck,lung,uterine,lymphoid_neoplasm, upper_gi,cervical,ovary,anorectal,melanoma

SEQ ID NO: 479933 - DNA, 165 bp, Homo sapiens; identical to SEQ ID NO: 344493
  chr21:42780066-42780231
  hypo
  thyroid vs. lung

SEQ ID NO: 479934 - DNA, 376 bp, Homo sapiens; identical to SEQ ID NO: 473227
  chr21:43239707-43240083
  hypo
  thyroid vs. lung,cervical,breast,anorectal,colorectal, prostate,non_cancer,bladder_and_urothelial,renal, multiple_myeloma,upper_gi,liver_bileduct,sarcoma,melanoma, pancreas_gallbladder,head_and_neck,uterine

SEQ ID NO: 479935 - DNA, 243 bp, Homo sapiens; identical to SEQ ID NO: 346252
  chr21:43240112-43240355
  hypo
  thyroid vs. lung,cervical,breast,anorectal,colorectal, prostate,non_cancer,bladder_and_urothelial,renal, multiple_myeloma,upper_gi,liver_bileduct,sarcoma,melanoma, pancreas_gallbladder,head_and_neck,uterine

SEQ ID NO: 479936 - DNA, 265 bp, Homo sapiens; identical to SEQ ID NO: 344515
  chr21:44441284-44441549
  hypo
  thyroid vs. anorectal

SEQ ID NO: 479937 - DNA, 330 bp, Homo sapiens; identical to SEQ ID NO: 344517
  chr21:44448081-44448411
  hypo
  thyroid vs. uterine,colorectal,renal,sarcoma, head_and_neck,bladder_and_urothelial,prostate,cervical, non_cancer,lymphoid_neoplasm,breast,upper_gi

SEQ ID NO: 479938 - DNA, 128 bp, Homo sapiens; identical to SEQ ID NO: 344518
  chr21:44451419-44451547
  hypo
  thyroid vs. anorectal,melanoma,head_and_neck,breast, renal,upper_gi,uterine,ovary,pancreas_gallbladder

SEQ ID NO: 479939 - DNA, 703 bp, Homo sapiens; identical to SEQ ID NO: 344535
  chr21:45345807-45346510
  hypo
  thyroid vs. liver_bileduct,anorectal,upper_gi,colorectal, uterine,head_and_neck,breast,non_cancer,prostate,lung,cervical, lymphoid_neoplasm,pancreas_gallbladder,bladder_and_urothelial, ovary,multiple_myeloma,sarcoma

SEQ ID NO: 479940 - DNA, 105 bp, Homo sapiens; identical to SEQ ID NO: 344539
  chr21:45499846-45499951
  hypo
  thyroid vs. liver_bileduct,ovary,breast,cervical,uterine, renal,head_and_neck,pancreas_gallbladder,upper_gi,colorectal, sarcoma,non_cancer,prostate,lymphoid_neoplasm, bladder_and_urothelial,multiple_myeloma

SEQ ID NO: 479941 - DNA, 326 bp, Homo sapiens; identical to SEQ ID NO: 344543
  chr21:45518831-45519157
  hypo
  thyroid vs. liver_bileduct,head_and_neck, bladder_and_urothelial,sarcoma

SEQ ID NO: 479942 - DNA, 663 bp, Homo sapiens; identical to SEQ ID NO: 368617
  chr21:46323288-46323951
  hypo
  thyroid vs. lymphoid_neoplasm,cervical,prostate

SEQ ID NO: 479943 - DNA, 210 bp, Homo sapiens; identical to SEQ ID NO: 383370
  chr21:47856005-47856215
  hypo
  thyroid vs. liver_bileduct

SEQ ID NO: 479944 - DNA, 45 bp, Homo sapiens; identical to SEQ ID NO: 461886
  chr22:18328049-18328094
  hypo
  thyroid vs. myeloid_neoplasm,melanoma

SEQ ID NO: 479945 - DNA, 537 bp, Homo sapiens; identical to SEQ ID NO: 356478
  chr22:18340868-18341405
  hypo
  thyroid vs. myeloid_neoplasm,multiple_myeloma

SEQ ID NO: 479946 - DNA, 388 bp, Homo sapiens; identical to SEQ ID NO: 344671
  chr22:19968748-19969136
  hypo
  thyroid vs. head_and_neck,uterine,prostate,colorectal, sarcoma,cervical,bladder_and_urothelial,breast,melanoma, non_cancer,lung,pancreas_gallbladder,renal,ovary,upper_gi, myeloid_neoplasm,multiple_myeloma,lymphoid_neoplasm

SEQ ID NO: 479947 - DNA, 20 bp, Homo sapiens
  chr22:22036124-22036144
  hypo
  thyroid vs. multiple_myeloma,bladder_and_urothelial
cgtgttcacacatgggtcct

SEQ ID NO: 479948 - DNA, 212 bp, Homo sapiens; identical to SEQ ID NO: 356492
  chr22:22036173-22036385
  hypo
  thyroid vs. multiple_myeloma,bladder_and_urothelial

SEQ ID NO: 479949 - DNA, 98 bp, Homo sapiens; identical to SEQ ID NO: 465538
  chr22:22057979-22058077
  hypo
  thyroid vs. non_cancer,renal,prostate,colorectal

SEQ ID NO: 479950 - DNA, 89 bp, Homo sapiens; identical to SEQ ID NO: 473249
  chr22:27019127-27019216
  hypo
  thyroid vs. colorectal,non_cancer

SEQ ID NO: 479951 - DNA, 67 bp, Homo sapiens; identical to SEQ ID NO: 344712
  chr22:29076607-29076674
  hypo
  thyroid vs. multiple_myeloma,lymphoid_neoplasm, myeloid_neoplasm,prostate,sarcoma,breast,uterine, pancreas_gallbladder,non_cancer,colorectal,renal

SEQ ID NO: 479952 - DNA, 80 bp, Homo sapiens; identical to SEQ ID NO: 455180
  chr22:30084279-30084359
  hypo
  thyroid vs. renal,pancreas_gallbladder,lymphoid_neoplasm

SEQ ID NO: 479953 - DNA, 120 bp, Homo sapiens; identical to SEQ ID NO: 356519
  chr22:30084388-30084508
  hypo
  thyroid vs. renal,pancreas_gallbladder,lymphoid_neoplasm

SEQ ID NO: 479954 - DNA, 567 bp, Homo sapiens; identical to SEQ ID NO: 368769
  chr22:31522433-31523000
  hypo
  thyroid vs. uterine,ovary,breast

SEQ ID NO: 479955 - DNA, 269 bp, Homo sapiens; identical to SEQ ID NO: 356530
  chr22:35848670-35848939
  hypo
  thyroid vs. multiple_myeloma,myeloid_neoplasm,renal, lymphoid_neoplasm

SEQ ID NO: 479956 - DNA, 228 bp, Homo sapiens; identical to SEQ ID NO: 344767
  chr22:38528855-38529083
  hypo
  thyroid vs. ovary

SEQ ID NO: 479957 - DNA, 30 bp, Homo sapiens
  chr22:40991413-40991443
  hypo
  thyroid vs. melanoma,anorectal
cgcgcccggccgagaaatgccttttaaata

SEQ ID NO: 479958 - DNA, 190 bp, Homo sapiens; identical to SEQ ID NO: 344783
  chr22:41536192-41536382
  hypo
  thyroid vs. liver_bileduct,uterine,head_and_neck,ovary, bladder_and_urothelial,breast,pancreas_gallbladder, lymphoid_neoplasm,myeloid_neoplasm,cervical,non_cancer, colorectal,upper_gi,melanoma

SEQ ID NO: 479959 - DNA, 961 bp, Homo sapiens; identical to SEQ ID NO: 368864
  chr22:47298524-47299485
  hypo
  thyroid vs. liver_bileduct,anorectal,head_and_neck,renal, uterine,upper_gi

SEQ ID NO: 479960 - DNA, 398 bp, Homo sapiens; identical to SEQ ID NO: 368870
  chr22:47534595-47534993
  hypo
  thyroid vs. bladder_and_urothelial

SEQ ID NO: 479961 - DNA, 778 bp, Homo sapiens; identical to SEQ ID NO: 344885
  chr22:50894573-50895351
  hypo
  thyroid vs. bladder_and_urothelial,lung,renal,breast, head_and_neck,cervical,melanoma,ovary,liver_bileduct,colorectal, uterine,anorectal

SEQ ID NO: 479962 - DNA, 237 bp, Homo sapiens; identical to SEQ ID NO: 375373
  chr22:51112317-51112554
  hypo
  thyroid vs. myeloid_neoplasm

SEQ ID NO: 479963 - DNA, 327 bp, Homo sapiens; identical to SEQ ID NO: 479398
  chr3:4909962-4910289
  hypo
  thyroid vs. renal,anorectal,cervical,non_cancer

SEQ ID NO: 479964 - DNA, 210 bp, Homo sapiens; identical to SEQ ID NO: 349726
  chr3:4910550-4910760
  hypo
  thyroid vs. renal,anorectal,cervical,non_cancer

SEQ ID NO: 479965 - DNA, 546 bp, Homo sapiens; identical to SEQ ID NO: 338029
  chr3:11655438-11655984
  hypo
  thyroid vs. liver_bileduct,pancreas_gallbladder, head_and_neck,multiple_myeloma,uterine,cervical,non_cancer, colorectal,lymphoid_neoplasm,breast,renal,melanoma,upper_gi, prostate,ovary,anorectal

SEQ ID NO: 479966 - DNA, 79 bp, Homo sapiens; identical to SEQ ID NO: 338032
  chr3:12605281-12605360
  hypo
  thyroid vs. multiple_myeloma,pancreas_gallbladder, lymphoid_neoplasm,liver_bileduct,breast,lung, bladder_and_urothelial,renal,colorectal,non_cancer,cervical, melanoma,prostate,head_and_neck

SEQ ID NO: 479967 - DNA, 53 bp, Homo sapiens; identical to SEQ ID NO: 338047
  chr3:15079942-15079995
  hypo
  thyroid vs. lung,ovary,head_and_neck, bladder_and_urothelial,cervical,uterine,lymphoid_neoplasm, non_cancer,upper_gi,renal,colorectal,breast

SEQ ID NO: 479968 - DNA, 79 bp, Homo sapiens; identical to SEQ ID NO: 465568
  chr3:15123770-15123849
  hypo
  thyroid vs. renal,head_and_neck,ovary,prostate, lymphoid_neoplasm,sarcoma,uterine,cervical,anorectal,non_cancer, breast,upper_gi,colorectal,multiple_myeloma,liver_bileduct, pancreas_gallbladder,bladder_and_urothelial,myeloid_neoplasm

SEQ ID NO: 479969 - DNA, 42 bp, Homo sapiens; identical to SEQ ID NO: 345790
  chr3:15123992-15124034
  hypo
  thyroid vs. renal,head_and_neck,ovary,prostate, lymphoid_neoplasm,sarcoma,uterine,cervical,anorectal,non_cancer, breast,upper_gi,colorectal,multiple_myeloma,liver_bileduct, pancreas_gallbladder,bladder_and_urothelial,myeloid_neoplasm

SEQ ID NO: 479970 - DNA, 328 bp, Homo sapiens; identical to SEQ ID NO: 338063
  chr3:33216338-33216666
  hypo
  thyroid vs. anorectal

SEQ ID NO: 479971 - DNA, 92 bp, Homo sapiens; identical to SEQ ID NO: 338065
  chr3:33437677-33437769
  hypo
  thyroid vs. renal,ovary,head_and_neck,upper_gi, colorectal,lung,breast,prostate,uterine,bladder_and_urothelial, melanoma,non_cancer,pancreas_gallbladder

SEQ ID NO: 479972 - DNA, 255 bp, Homo sapiens; identical to SEQ ID NO: 338088
  chr3:45719334-45719589
  hypo
  thyroid vs. colorectal,myeloid_neoplasm,uterine,renal, pancreas_gallbladder,liver_bileduct,lymphoid_neoplasm,upper_gi, bladder_and_urothelial

SEQ ID NO: 479973 - DNA, 97 bp, Homo sapiens; identical to SEQ ID NO: 338098
  chr3:49662414-49662511
  hypo
  thyroid vs. ovary

SEQ ID NO: 479974 - DNA, 557 bp, Homo sapiens; identical to SEQ ID NO: 347983
  chr3:49720262-49720819
  hypo
  thyroid vs. lung,sarcoma,cervical,liver_bileduct, anorectal,melanoma,lymphoid_neoplasm,upper_gi,prostate,breast, head_and_neck,non_cancer,colorectal,uterine,multiple_myeloma, bladder_and_urothelial,pancreas_gallbladder

SEQ ID NO: 479975 - DNA, 143 bp, Homo sapiens; identical to SEQ ID NO: 338103
  chr3:50144939-50145082
  hypo
  thyroid vs. liver_bileduct,bladder_and_urothelial, uterine,pancreas_gallbladder

SEQ ID NO: 479976 - DNA, 62 bp, Homo sapiens; identical to SEQ ID NO: 338107
  chr3:51623983-51624045
  hypo
  thyroid vs. lung,liver_bileduct,uterine,upper_gi, multiple_myeloma,pancreas_gallbladder,sarcoma,cervical, anorectal,colorectal,melanoma,prostate,non_cancer, bladder_and_urothelial,lymphoid_neoplasm,renal

SEQ ID NO: 479977 - DNA, 111 bp, Homo sapiens; identical to SEQ ID NO: 338121
  chr3:57679987-57680098
  hypo
  thyroid vs. sarcoma,liver_bileduct,prostate, myeloid_neoplasm,head_and_neck,breast,colorectal,cervical

SEQ ID NO: 479978 - DNA, 69 bp, Homo sapiens; identical to SEQ ID NO: 338144
  chr3:87297469-87297538
  hypo
  thyroid vs. lung,uterine,upper_gi,prostate,ovary, cervical,head_and_neck,melanoma,pancreas_gallbladder,colorectal

SEQ ID NO: 479979 - DNA, 84 bp, Homo sapiens; identical to SEQ ID NO: 345809
  chr3:121500635-121500719
  hypo
  thyroid vs. lung,liver_bileduct,bladder_and_urothelial, breast,head_and_neck,sarcoma,lymphoid_neoplasm,uterine,cervical, prostate,pancreas_gallbladder,upper_gi,colorectal,non_cancer, multiple_myeloma,melanoma

SEQ ID NO: 479980 - DNA, 435 bp, Homo sapiens; identical to SEQ ID NO: 338170
  chr3:124716572-124717007
  hypo
  thyroid vs. melanoma

SEQ ID NO: 479981 - DNA, 175 bp, Homo sapiens; identical to SEQ ID NO: 338185
  chr3:128340992-128341167
  hypo
  thyroid vs. upper_gi,colorectal

SEQ ID NO: 479982 - DNA, 92 bp, Homo sapiens; identical to SEQ ID NO: 338194
  chr3:130460761-130460853
  hypo
  thyroid vs. myeloid_neoplasm,breast,lymphoid_neoplasm, sarcoma,pancreas_gallbladder,colorectal,cervical,renal, head_and_neck,anorectal,uterine,prostate,non_cancer

SEQ ID NO: 479983 - DNA, 104 bp, Homo sapiens; identical to SEQ ID NO: 338240
  chr3:170588570-170588674
  hypo
  thyroid vs. liver_bileduct,multiple_myeloma, lymphoid_neoplasm,pancreas_gallbladder,lung

SEQ ID NO: 479984 - DNA, 9 bp, Homo sapiens
  chr3:182800469-182800478
  hypo
  thyroid vs. renal,melanoma,pancreas_gallbladder, lymphoid_neoplasm,head_and_neck,uterine,colorectal,upper_gi, ovary,non_cancer,cervical,sarcoma,bladder_and_urothelial, prostate
cgagagaac

SEQ ID NO: 479985 - DNA, 13 bp, Homo sapiens
  chr3:182800507-182800520
  hypo
  thyroid vs. renal,melanoma,pancreas_gallbladder, lymphoid_neoplasm,head_and_neck,uterine,colorectal,upper_gi, ovary,non_cancer,cervical,sarcoma,bladder_and_urothelial, prostate
gtaacgccaacac

SEQ ID NO: 479986 - DNA, 52 bp, Homo sapiens; identical to SEQ ID NO: 338270
  chr3:184042674-184042726
  hypo
  thyroid vs. head_and_neck,cervical,melanoma, lymphoid_neoplasm,colorectal,anorectal,ovary,renal, pancreas_gallbladder,uterine,non_cancer,breast,prostate, upper_gi,lung,liver_bileduct,sarcoma,bladder_and_urothelial,
  CONT. FROM ABOVE: myeloid_neoplasm

SEQ ID NO: 479987 - DNA, 90 bp, Homo sapiens; identical to SEQ ID NO: 338290
  chr3:186442824-186442914
  hypo
  thyroid vs. prostate,melanoma

SEQ ID NO: 479988 - DNA, 352 bp, Homo sapiens; identical to SEQ ID NO: 357789
  chr3:193852659-193853011
  hypo
  thyroid vs. myeloid_neoplasm,anorectal,multiple_myeloma, melanoma,lung

SEQ ID NO: 479989 - DNA, 296 bp, Homo sapiens; identical to SEQ ID NO: 338306
  chr3:193969977-193970273
  hypo
  thyroid vs. liver_bileduct,melanoma,upper_gi,anorectal, bladder_and_urothelial,colorectal,cervical,pancreas_gallbladder, breast,non_cancer,prostate,renal,head_and_neck

SEQ ID NO: 479990 - DNA, 363 bp, Homo sapiens; identical to SEQ ID NO: 465589
  chr3:195536308-195536671
  hypo
  thyroid vs. melanoma

SEQ ID NO: 479991 - DNA, 583 bp, Homo sapiens; identical to SEQ ID NO: 472571
  chr3:195599104-195599687
  hypo
  thyroid vs. non_cancer,prostate,multiple_myeloma,breast, uterine,melanoma,myeloid_neoplasm,bladder_and_urothelial, cervical,lymphoid_neoplasm,renal,sarcoma,colorectal

SEQ ID NO: 479992 - DNA, 163 bp, Homo sapiens; identical to SEQ ID NO: 473286
  chr3:195599840-195600003
  hypo
  thyroid vs. non_cancer,prostate,multiple_myeloma,breast, uterine,melanoma,myeloid_neoplasm,bladder_and_urothelial, cervical,lymphoid_neoplasm,renal,sarcoma,colorectal

SEQ ID NO: 479993 - DNA, 174 bp, Homo sapiens; identical to SEQ ID NO: 472572
  chr3:195599513-195599687
  hypo
  thyroid vs. melanoma,prostate,non_cancer, multiple_myeloma,uterine,breast,myeloid_neoplasm,renal, colorectal,bladder_and_urothelial,sarcoma,lymphoid_neoplasm

SEQ ID NO: 479994 - DNA, 247 bp, Homo sapiens; identical to SEQ ID NO: 473288
  chr3:195599840-195600087
  hypo
  thyroid vs. melanoma,prostate,non_cancer, multiple_myeloma,uterine,breast,myeloid_neoplasm,renal, colorectal,bladder_and_urothelial,sarcoma,lymphoid_neoplasm

SEQ ID NO: 479995 - DNA, 49 bp, Homo sapiens; identical to SEQ ID NO: 345828
  chr3:195601363-195601412
  hypo
  thyroid vs. melanoma,prostate,myeloid_neoplasm, non_cancer,multiple_myeloma,anorectal,breast,lymphoid_neoplasm, cervical,bladder_and_urothelial,uterine,head_and_neck

SEQ ID NO: 479996 - DNA, 32 bp, Homo sapiens; identical to SEQ ID NO: 353428
  chr3:195709683-195709715
  hypo
  thyroid vs. ovary,anorectal,melanoma,colorectal, pancreas_gallbladder,head_and_neck,lung,uterine,liver_bileduct, breast,renal,prostate,myeloid_neoplasm,upper_gi,sarcoma, lymphoid_neoplasm,multiple_myeloma,non_cancer,cervical

SEQ ID NO: 479997 - DNA, 79 bp, Homo sapiens; identical to SEQ ID NO: 338337
  chr3:197612493-197612572
  hypo
  thyroid vs. lymphoid_neoplasm,liver_bileduct,ovary, uterine,renal,pancreas_gallbladder,sarcoma,myeloid_neoplasm

SEQ ID NO: 479998 - DNA, 32 bp, Homo sapiens; identical to SEQ ID NO: 353437
  chr4:619879-619911
  hypo
  thyroid vs. colorectal,sarcoma,lymphoid_neoplasm

SEQ ID NO: 479999 - DNA, 329 bp, Homo sapiens; identical to SEQ ID NO: 338384
  chr4:1738699-1739028
  hypo
  thyroid vs. sarcoma,head_and_neck,melanoma, bladder_and_urothelial,lung,lymphoid_neoplasm,breast, pancreas_gallbladder,prostate,upper_gi,uterine,colorectal, non_cancer,cervical,liver_bileduct,multiple_myeloma,ovary,renal,
  CONT. FROM ABOVE: anorectal,myeloid_neoplasm

SEQ ID NO: 480000 - DNA, 211 bp, Homo sapiens; identical to SEQ ID NO: 338408
  chr4:2639936-2640147
  hypo
  thyroid vs. renal,melanoma,lymphoid_neoplasm,non_cancer, bladder_and_urothelial,colorectal,multiple_myeloma

SEQ ID NO: 480001 - DNA, 118 bp, Homo sapiens; identical to SEQ ID NO: 338409
  chr4:2640614-2640732
  hypo
  thyroid vs. sarcoma,liver_bileduct,ovary,breast, multiple_myeloma,melanoma,head_and_neck,upper_gi, lymphoid_neoplasm,colorectal,renal,non_cancer,myeloid_neoplasm, uterine,cervical,prostate

SEQ ID NO: 480002 - DNA, 409 bp, Homo sapiens; identical to SEQ ID NO: 338411
  chr4:2688489-2688898
  hypo
  thyroid vs. multiple_myeloma

SEQ ID NO: 480003 - DNA, 527 bp, Homo sapiens; identical to SEQ ID NO: 473320
  chr4:3252217-3252744
  hypo
  thyroid vs. melanoma

SEQ ID NO: 480004 - DNA, 201 bp, Homo sapiens; identical to SEQ ID NO: 353475
  chr4:3252797-3252998
  hypo
  thyroid vs. melanoma

SEQ ID NO: 480005 - DNA, 127 bp, Homo sapiens; identical to SEQ ID NO: 357829
  chr4:6717788-6717915
  hypo
  thyroid vs. lung,ovary,lymphoid_neoplasm

SEQ ID NO: 480006 - DNA, 69 bp, Homo sapiens; identical to SEQ ID NO: 377125
  chr4:9602020-9602089
  hypo
  thyroid vs. liver_bileduct

SEQ ID NO: 480007 - DNA, 342 bp, Homo sapiens; identical to SEQ ID NO: 353485
  chr4:10087759-10088101
  hypo
  thyroid vs. ovary,anorectal,multiple_myeloma,cervical, upper_gi,uterine,lymphoid_neoplasm,liver_bileduct,lung, bladder_and_urothelial,breast,colorectal,head_and_neck,renal, melanoma,prostate,pancreas_gallbladder,myeloid_neoplasm,
  CONT. FROM ABOVE: non_cancer

SEQ ID NO: 480008 - DNA, 413 bp, Homo sapiens; identical to SEQ ID NO: 338460
  chr4:10120458-10120871
  hypo
  thyroid vs. ovary,pancreas_gallbladder, bladder_and_urothelial,cervical,breast,colorectal,renal, head_and_neck,uterine

SEQ ID NO: 480009 - DNA, 58 bp, Homo sapiens; identical to SEQ ID NO: 338461
  chr4:10128984-10129042
  hypo
  thyroid vs. ovary,colorectal

SEQ ID NO: 480010 - DNA, 358 bp, Homo sapiens; identical to SEQ ID NO: 338464
  chr4:13600978-13601336
  hypo
  thyroid vs. sarcoma

SEQ ID NO: 480011 - DNA, 70 bp, Homo sapiens; identical to SEQ ID NO: 338488
  chr4:48887296-48887366
  hypo
  thyroid vs. ovary

SEQ ID NO: 480012 - DNA, 108 bp, Homo sapiens; identical to SEQ ID NO: 338503
  chr4:71857989-71858097
  hypo
  thyroid vs. multiple_myeloma,liver_bileduct,sarcoma, breast,myeloid_neoplasm,prostate,lymphoid_neoplasm, pancreas_gallbladder,renal,non_cancer,colorectal,melanoma, upper_gi

SEQ ID NO: 480013 - DNA, 28 bp, Homo sapiens
  chr4:83323708-83323736
  hypo
  thyroid vs. bladder_and_urothelial,head_and_neck,breast, ovary,cervical,colorectal,non_cancer,prostate,sarcoma,renal, uterine,lymphoid_neoplasm,pancreas_gallbladder,melanoma, multiple_myeloma
cggcggggggcagcgggagcagtagttc

SEQ ID NO: 480014 - DNA, 57 bp, Homo sapiens; identical to SEQ ID NO: 338519
  chr4:99936215-99936272
  hypo
  thyroid vs. ovary,upper_gi,liver_bileduct,colorectal, pancreas_gallbladder,lymphoid_neoplasm,sarcoma,prostate, myeloid_neoplasm,breast,head_and_neck,renal,uterine,melanoma

SEQ ID NO: 480015 - DNA, 168 bp, Homo sapiens; identical to SEQ ID NO: 338523
  chr4:103421142-103421310
  hypo
  thyroid vs. anorectal,prostate,non_cancer, bladder_and_urothelial,pancreas_gallbladder,upper_gi,melanoma, lung,myeloid_neoplasm,breast,multiple_myeloma,cervical, head_and_neck

SEQ ID NO: 480016 - DNA, 373 bp, Homo sapiens; identical to SEQ ID NO: 363621
  chr4:153943334-153943707
  hypo
  thyroid vs. myeloid_neoplasm

SEQ ID NO: 480017 - DNA, 227 bp, Homo sapiens; identical to SEQ ID NO: 370585
  chr4:154387493-154387720
  hypo
  thyroid vs. head_and_neck

SEQ ID NO: 480018 - DNA, 132 bp, Homo sapiens; identical to SEQ ID NO: 338567
  chr4:183808118-183808250
  hypo
  thyroid vs. liver_bileduct

SEQ ID NO: 480019 - DNA, 166 bp, Homo sapiens; identical to SEQ ID NO: 338568
  chr4:183809411-183809577
  hypo
  thyroid vs. liver_bileduct,lung

SEQ ID NO: 480020 - DNA, 290 bp, Homo sapiens; identical to SEQ ID NO: 338569
  chr4:183815970-183816260
  hypo
  thyroid vs. head_and_neck,liver_bileduct,sarcoma,lung, uterine

SEQ ID NO: 480021 - DNA, 740 bp, Homo sapiens; identical to SEQ ID NO: 472207
  chr5:465064-465804
  hypo
  thyroid vs. ovary,bladder_and_urothelial,lung,sarcoma, anorectal,melanoma,renal,breast,upper_gi,head_and_neck

SEQ ID NO: 480022 - DNA, 463 bp, Homo sapiens; identical to SEQ ID NO: 459074
  chr5:465360-465823
  hypo
  thyroid vs. lung,lymphoid_neoplasm,upper_gi,renal, pancreas_gallbladder,bladder_and_urothelial,head_and_neck

SEQ ID NO: 480023 - DNA, 258 bp, Homo sapiens; identical to SEQ ID NO: 353535
  chr5:465852-466110
  hypo
  thyroid vs. lung,lymphoid_neoplasm,upper_gi,renal, pancreas_gallbladder,bladder_and_urothelial,head_and_neck

SEQ ID NO: 480024 - DNA, 54 bp, Homo sapiens; identical to SEQ ID NO: 338603
  chr5:667302-667356
  hypo
  thyroid vs. liver_bileduct,bladder_and_urothelial, cervical,upper_gi

SEQ ID NO: 480025 - DNA, 18 bp, Homo sapiens
  chr5:10248673-10248691
  hypo
  thyroid vs. multiple_myeloma,bladder_and_urothelial, head_and_neck
ttttagagacagaatctc

SEQ ID NO: 480026 - DNA, 112 bp, Homo sapiens
  chr5:67590957-67591069
  hypo
  thyroid vs. lymphoid_neoplasm,colorectal, myeloid_neoplasm,non_cancer,multiple_myeloma,upper_gi,prostate, renal,liver_bileduct,sarcoma,pancreas_gallbladder,melanoma, bladder_and_urothelial,ovary
cgtttcttttgcctgcaggattatgcataattatgataagttgaagtctcgaatcagtgaaattattgacagtagaagaagattggaagaagacttgaagaagcaggcagct

SEQ ID NO: 480027 - DNA, 115 bp, Homo sapiens
  chr5:67591157-67591272
  hypo
  thyroid vs. lymphoid_neoplasm,colorectal, myeloid_neoplasm,non_cancer,multiple_myeloma,upper_gi,prostate, renal,liver_bileduct,sarcoma,pancreas_gallbladder,melanoma, bladder_and_urothelial,ovary
tatttgaaatggaatcctatacatgaataattggtgattgctacaattcaggatgagttaatgcgttctcttttcaaaactgtttttcaggtggttgactcaaaaaggtgttcgg

SEQ ID NO: 480028 - DNA, 96 bp, Homo sapiens; identical to SEQ ID NO: 338733
  chr5:67717809-67717905
  hypo
  thyroid vs. sarcoma,melanoma,non_cancer,colorectal, upper_gi,breast

SEQ ID NO: 480029 - DNA, 752 bp, Homo sapiens; identical to SEQ ID NO: 453293
  chr5:75698708-75699460
  hypo
  thyroid vs. myeloid_neoplasm,cervical

SEQ ID NO: 480030 - DNA, 41 bp, Homo sapiens
  chr5:79598641-79598682
  hypo
  thyroid vs. sarcoma
cgagagcagtgatatcgtcatgcatggtgagctggcagcag

SEQ ID NO: 480031 - DNA, 24 bp, Homo sapiens
  chr5:79598759-79598783
  hypo
  thyroid vs. sarcoma
gtttgttttttgagatggagtttc

SEQ ID NO: 480032 - DNA, 309 bp, Homo sapiens; identical to SEQ ID NO: 338773
  chr5:107703589-107703898
  hypo
  thyroid vs. breast

SEQ ID NO: 480033 - DNA, 269 bp, Homo sapiens; identical to SEQ ID NO: 338783
  chr5:126250520-126250789
  hypo
  thyroid vs. upper_gi,cervical,uterine,sarcoma, lymphoid_neoplasm,head_and_neck,prostate,colorectal, myeloid_neoplasm,bladder_and_urothelial,anorectal,breast, non_cancer,ovary,renal,pancreas_gallbladder,multiple_myeloma

SEQ ID NO: 480034 - DNA, 192 bp, Homo sapiens; identical to SEQ ID NO: 363826
  chr5:134524773-134524965
  hypo
  thyroid vs. bladder_and_urothelial

SEQ ID NO: 480035 - DNA, 102 bp, Homo sapiens; identical to SEQ ID NO: 338804
  chr5:136983271-136983373
  hypo
  thyroid vs. uterine,sarcoma

SEQ ID NO: 480036 - DNA, 196 bp, Homo sapiens; identical to SEQ ID NO: 338805
  chr5:137895663-137895859
  hypo
  thyroid vs. melanoma

SEQ ID NO: 480037 - DNA, 625 bp, Homo sapiens; identical to SEQ ID NO: 456042
  chr5:142781875-142782500
  hypo
  thyroid vs. multiple_myeloma,myeloid_neoplasm

SEQ ID NO: 480038 - DNA, 78 bp, Homo sapiens; identical to SEQ ID NO: 456043
  chr5:142782625-142782703
  hypo
  thyroid vs. multiple_myeloma,myeloid_neoplasm

SEQ ID NO: 480039 - DNA, 225 bp, Homo sapiens; identical to SEQ ID NO: 338832
  chr5:156895577-156895802
  hypo
  thyroid vs. anorectal,ovary,uterine,cervical, bladder_and_urothelial,sarcoma

SEQ ID NO: 480040 - DNA, 398 bp, Homo sapiens; identical to SEQ ID NO: 338842
  chr5:159707402-159707800
  hypo
  thyroid vs. ovary,sarcoma,head_and_neck

SEQ ID NO: 480041 - DNA, 30 bp, Homo sapiens
  chr5:171682602-171682632
  hypo
  thyroid vs. liver_bileduct,pancreas_gallbladder, bladder_and_urothelial,ovary,head_and_neck,renal,uterine, upper_gi
cgcatgcagcaggcgctctccctgcgttcc

SEQ ID NO: 480042 - DNA, 108 bp, Homo sapiens; identical to SEQ ID NO: 338860
  chr5:172191069-172191177
  hypo
  thyroid vs. lung,melanoma,multiple_myeloma,upper_gi, myeloid_neoplasm,colorectal,sarcoma,liver_bileduct, pancreas_gallbladder,breast,renal,bladder_and_urothelial, head_and_neck,non_cancer,cervical,uterine,prostate

SEQ ID NO: 480043 - DNA, 291 bp, Homo sapiens; identical to SEQ ID NO: 338862
  chr5:172461494-172461785
  hypo
  thyroid vs. bladder_and_urothelial,multiple_myeloma, colorectal,breast,renal,lung,liver_bileduct,uterine,upper_gi, ovary,prostate

SEQ ID NO: 480044 - DNA, 93 bp, Homo sapiens; identical to SEQ ID NO: 338870
  chr5:175578331-175578424
  hypo
  thyroid vs. prostate,non_cancer,lymphoid_neoplasm,breast, sarcoma

SEQ ID NO: 480045 - DNA, 211 bp, Homo sapiens; identical to SEQ ID NO: 338871
  chr5:175777496-175777707
  hypo
  thyroid vs. bladder_and_urothelial,sarcoma,upper_gi, uterine,renal,colorectal,cervical,anorectal,ovary, pancreas_gallbladder,breast,head_and_neck,prostate,non_cancer, lymphoid_neoplasm,myeloid_neoplasm,melanoma,liver_bileduct

SEQ ID NO: 480046 - DNA, 59 bp, Homo sapiens; identical to SEQ ID NO: 338880
  chr5:176596473-176596532
  hypo
  thyroid vs. liver_bileduct,ovary,upper_gi,head_and_neck, breast,sarcoma,bladder_and_urothelial

SEQ ID NO: 480047 - DNA, 294 bp, Homo sapiens; identical to SEQ ID NO: 353705
  chr5:177650761-177651055
  hypo
  thyroid vs. liver_bileduct,prostate,head_and_neck, colorectal,breast,lymphoid_neoplasm,cervical,uterine,anorectal, upper_gi,non_cancer,pancreas_gallbladder

SEQ ID NO: 480048 - DNA, 176 bp, Homo sapiens; identical to SEQ ID NO: 473368
  chr6:1708438-1708614
  hypo
  thyroid vs. colorectal

SEQ ID NO: 480049 - DNA, 96 bp, Homo sapiens; identical to SEQ ID NO: 363945
  chr6:1708643-1708739
  hypo
  thyroid vs. colorectal

SEQ ID NO: 480050 - DNA, 37 bp, Homo sapiens; identical to SEQ ID NO: 345876
  chr6:4910947-4910984
  hypo
  thyroid vs. bladder_and_urothelial,multiple_myeloma, non_cancer,lymphoid_neoplasm,liver_bileduct,renal,colorectal, prostate,sarcoma,cervical,myeloid_neoplasm,upper_gi,melanoma, uterine,pancreas_gallbladder

SEQ ID NO: 480051 - DNA, 95 bp, Homo sapiens; identical to SEQ ID NO: 338966
  chr6:6780570-6780665
  hypo
  thyroid vs. cervical

SEQ ID NO: 480052 - DNA, 201 bp, Homo sapiens; identical to SEQ ID NO: 479168
  chr6:26025540-26025741
  hypo
  thyroid vs. ovary,non_cancer

SEQ ID NO: 480053 - DNA, 149 bp, Homo sapiens; identical to SEQ ID NO: 339011
  chr6:33914107-33914256
  hypo
  thyroid vs. anorectal

SEQ ID NO: 480054 - DNA, 97 bp, Homo sapiens; identical to SEQ ID NO: 339027
  chr6:36939067-36939164
  hypo
  thyroid vs. uterine,melanoma,ovary

SEQ ID NO: 480055 - DNA, 158 bp, Homo sapiens; identical to SEQ ID NO: 339032
  chr6:37450665-37450823
  hypo
  thyroid vs. sarcoma,anorectal,cervical

SEQ ID NO: 480056 - DNA, 66 bp, Homo sapiens; identical to SEQ ID NO: 339122
  chr6:112021634-112021700
  hypo
  thyroid vs. anorectal,lung,head_and_neck,cervical, myeloid_neoplasm,sarcoma,ovary,uterine,renal,upper_gi,prostate, breast,non_cancer,bladder_and_urothelial

SEQ ID NO: 480057 - DNA, 97 bp, Homo sapiens; identical to SEQ ID NO: 339138
  chr6:136980882-136980979
  hypo
  thyroid vs. colorectal,lung,breast,sarcoma,renal, bladder_and_urothelial,pancreas_gallbladder,prostate,melanoma, cervical,non_cancer,lymphoid_neoplasm,upper_gi

SEQ ID NO: 480058 - DNA, 16 bp, Homo sapiens
  chr6:152623493-152623509
  hypo
  thyroid vs. lymphoid_neoplasm,myeloid_neoplasm,uterine, bladder_and_urothelial,non_cancer,breast,prostate,sarcoma, liver_bileduct
ggaatcatgaacttcc

SEQ ID NO: 480059 - DNA, 63 bp, Homo sapiens; identical to SEQ ID NO: 339159
  chr6:157159632-157159695
  hypo
  thyroid vs. pancreas_gallbladder,lung,uterine,ovary, renal,sarcoma,cervical,lymphoid_neoplasm,head_and_neck, anorectal,melanoma,liver_bileduct,upper_gi,non_cancer, colorectal,breast,multiple_myeloma,prostate

SEQ ID NO: 480060 - DNA, 62 bp, Homo sapiens; identical to SEQ ID NO: 339167
  chr6:158057907-158057969
  hypo
  thyroid vs. melanoma,bladder_and_urothelial

SEQ ID NO: 480061 - DNA, 433 bp, Homo sapiens; identical to SEQ ID NO: 339173
  chr6:159045072-159045505
  hypo
  thyroid vs. anorectal,melanoma,upper_gi,breast, head_and_neck,lung,multiple_myeloma,renal,colorectal, myeloid_neoplasm,uterine,pancreas_gallbladder,cervical,ovary, non_cancer,lymphoid_neoplasm,liver_bileduct

SEQ ID NO: 480062 - DNA, 224 bp, Homo sapiens; identical to SEQ ID NO: 467607
  chr7:192753-192977
  hypo
  thyroid vs. liver_bileduct

SEQ ID NO: 480063 - DNA, 512 bp, Homo sapiens; identical to SEQ ID NO: 467608
  chr7:193101-193613
  hypo
  thyroid vs. liver_bileduct

SEQ ID NO: 480064 - DNA, 34 bp, Homo sapiens; identical to SEQ ID NO: 358711
  chr7:193708-193742
  hypo
  thyroid vs. liver_bileduct

SEQ ID NO: 480065 - DNA, 40 bp, Homo sapiens; identical to SEQ ID NO: 339254
  chr7:711727-711767
  hypo
  thyroid vs. ovary

SEQ ID NO: 480066 - DNA, 42 bp, Homo sapiens
  chr7:819359-819401
  hypo
  thyroid vs. sarcoma,liver_bileduct
cgcagcagggcctgggccgcctccactctgttggctggggtt

SEQ ID NO: 480067 - DNA, 138 bp, Homo sapiens; identical to SEQ ID NO: 377932
  chr7:819698-819836
  hypo
  thyroid vs. sarcoma,liver_bileduct

SEQ ID NO: 480068 - DNA, 139 bp, Homo sapiens
  chr7:1556123-1556262
  hypo
  thyroid vs. ovary
cggccgaactttcctttaaaaaaacaaaaaaaaaaaagccaatacatgtcccagggattccaacccatgtcctatcgcagttcccagatggcatttctttcactgagtcgtgccacaacaaactcacaccagatcatgc

SEQ ID NO: 480069 - DNA, 233 bp, Homo sapiens; identical to SEQ ID NO: 339296
  chr7:1563405-1563638
  hypo
  thyroid vs. lung

SEQ ID NO: 480070 - DNA, 234 bp, Homo sapiens; identical to SEQ ID NO: 472305
  chr7:1784457-1784691
  hypo
  thyroid vs. cervical

SEQ ID NO: 480071 - DNA, 370 bp, Homo sapiens; identical to SEQ ID NO: 377977
  chr7:1784927-1785297
  hypo
  thyroid vs. cervical

SEQ ID NO: 480072 - DNA, 156 bp, Homo sapiens; identical to SEQ ID NO: 339332
  chr7:2236075-2236231
  hypo
  thyroid vs. liver_bileduct

SEQ ID NO: 480073 - DNA, 114 bp, Homo sapiens; identical to SEQ ID NO: 339333
  chr7:2237109-2237223
  hypo
  thyroid vs. pancreas_gallbladder,myeloid_neoplasm,ovary, breast,cervical,anorectal,melanoma,colorectal,liver_bileduct, bladder_and_urothelial,prostate,non_cancer,upper_gi, head_and_neck,uterine,multiple_myeloma

SEQ ID NO: 480074 - DNA, 137 bp, Homo sapiens; identical to SEQ ID NO: 465702
  chr7:2237982-2238119
  hypo
  thyroid vs. multiple_myeloma,uterine,renal,colorectal, liver_bileduct,head_and_neck,pancreas_gallbladder,breast, non_cancer,upper_gi,bladder_and_urothelial,prostate, lymphoid_neoplasm,cervical,sarcoma,melanoma,ovary

SEQ ID NO: 480075 - DNA, 261 bp, Homo sapiens; identical to SEQ ID NO: 378005
  chr7:2255762-2256023
  hypo
  thyroid vs. liver_bileduct

SEQ ID NO: 480076 - DNA, 440 bp, Homo sapiens; identical to SEQ ID NO: 257151
  chr7:2643038-2643478
  hypo
  thyroid vs. ovary,anorectal,lung,melanoma,colorectal, lymphoid_neoplasm,breast,uterine,renal

SEQ ID NO: 480077 - DNA, 145 bp, Homo sapiens; identical to SEQ ID NO: 339351
  chr7:2804422-2804567
  hypo
  thyroid vs. bladder_and_urothelial,renal,cervical,breast, lung,pancreas_gallbladder,myeloid_neoplasm,non_cancer,prostate, colorectal,upper_gi,lymphoid_neoplasm,sarcoma,head_and_neck, liver_bileduct,melanoma,uterine,ovary

SEQ ID NO: 480078 - DNA, 145 bp, Homo sapiens; identical to SEQ ID NO: 339400
  chr7:6682673-6682818
  hypo
  thyroid vs. melanoma

SEQ ID NO: 480079 - DNA, 141 bp, Homo sapiens; identical to SEQ ID NO: 456108
  chr7:22893437-22893578
  hypo
  thyroid vs. multiple_myeloma

SEQ ID NO: 480080 - DNA, 700 bp, Homo sapiens; identical to SEQ ID NO: 456109
  chr7:22893607-22894307
  hypo
  thyroid vs. multiple_myeloma

SEQ ID NO: 480081 - DNA, 108 bp, Homo sapiens; identical to SEQ ID NO: 339430
  chr7:26667960-26668068
  hypo
  thyroid vs. anorectal

SEQ ID NO: 480082 - DNA, 490 bp, Homo sapiens; identical to SEQ ID NO: 339464
  chr7:36338992-36339482
  hypo
  thyroid vs. anorectal,bladder_and_urothelial,cervical, upper_gi

SEQ ID NO: 480083 - DNA, 173 bp, Homo sapiens; identical to SEQ ID NO: 339475
  chr7:43116313-43116486
  hypo
  thyroid vs. ovary

SEQ ID NO: 480084 - DNA, 51 bp, Homo sapiens; identical to SEQ ID NO: 348228
  chr7:44740672-44740723
  hypo
  thyroid vs. multiple_myeloma,sarcoma,colorectal,lung, cervical,pancreas_gallbladder,head_and_neck,liver_bileduct, upper_gi,anorectal,melanoma,prostate,breast,non_cancer

SEQ ID NO: 480085 - DNA, 367 bp, Homo sapiens; identical to SEQ ID NO: 472320
  chr7:44746549-44746916
  hypo
  thyroid vs. bladder_and_urothelial,sarcoma,anorectal

SEQ ID NO: 480086 - DNA, 79 bp, Homo sapiens; identical to SEQ ID NO: 364382
  chr7:44746945-44747024
  hypo
  thyroid vs. bladder_and_urothelial,sarcoma,anorectal

SEQ ID NO: 480087 - DNA, 150 bp, Homo sapiens
  chr7:45091549-45091699
  hypo
  thyroid vs. ovary
cgcctcggcctcccaaagtgctggggttacaggcgtgagggtattttataggacattgaattccgtgatcatgtgcctactgctgtacctcctttagcactaagtgagtcccttgatccaaggtgatgatggtacttgctgtcccacatc

SEQ ID NO: 480088 - DNA, 237 bp, Homo sapiens; identical to SEQ ID NO: 479450
  chr7:80548021-80548258
  hypo
  thyroid vs. lung,uterine,ovary,anorectal

SEQ ID NO: 480089 - DNA, 446 bp, Homo sapiens; identical to SEQ ID NO: 358879
  chr7:80548403-80548849
  hypo
  thyroid vs. lung,uterine,ovary,anorectal

SEQ ID NO: 480090 - DNA, 236 bp, Homo sapiens; identical to SEQ ID NO: 339571
  chr7:100064586-100064822
  hypo
  thyroid vs. cervical,myeloid_neoplasm,colorectal, prostate

SEQ ID NO: 480091 - DNA, 209 bp, Homo sapiens; identical to SEQ ID NO: 474368
  chr7:127671450-127671659
  hypo
  thyroid vs. lung

SEQ ID NO: 480092 - DNA, 67 bp, Homo sapiens; identical to SEQ ID NO: 339610
  chr7:127673475-127673542
  hypo
  thyroid vs. renal,colorectal

SEQ ID NO: 480093 - DNA, 253 bp, Homo sapiens
  chr7:129782272-129782525
  hypo
  thyroid vs. myeloid_neoplasm,non_cancer,prostate, multiple_myeloma
cgcccctcctgggggccgaggactgtcaccatgtcactacggcactctccagctgctgaccaaagccctcgctaaccgcagccctgccatactctgggtctttcctctggagcaaggtgaagagactgcagcgaggcgtggaattgggaagctcttctggttttattaaaaactcgttccaccacaggagtcagcctggccactcaggtgtggggcgggtctctcctcatttagctttcacctgcgtgcccag

SEQ ID NO: 480094 - DNA, 379 bp, Homo sapiens; identical to SEQ ID NO: 378296
  chr7:129782554-129782933
  hypo
  thyroid vs. myeloid_neoplasm,non_cancer,prostate, multiple_myeloma

SEQ ID NO: 480095 - DNA, 58 bp, Homo sapiens; identical to SEQ ID NO: 339630
  chr7:132527738-132527796
  hypo
  thyroid vs. lung

SEQ ID NO: 480096 - DNA, 163 bp, Homo sapiens; identical to SEQ ID NO: 339633
  chr7:134613459-134613622
  hypo
  thyroid vs. uterine,head_and_neck

SEQ ID NO: 480097 - DNA, 32 bp, Homo sapiens; identical to SEQ ID NO: 460507
  chr7:140156493-140156525
  hypo
  thyroid vs. myeloid_neoplasm,prostate

SEQ ID NO: 480098 - DNA, 202 bp, Homo sapiens; identical to SEQ ID NO: 339658
  chr7:148079472-148079674
  hypo
  thyroid vs. sarcoma

SEQ ID NO: 480099 - DNA, 100 bp, Homo sapiens; identical to SEQ ID NO: 460508
  chr7:150069580-150069680
  hypo
  thyroid vs. melanoma

SEQ ID NO: 480100 - DNA, 115 bp, Homo sapiens; identical to SEQ ID NO: 460509
  chr7:150069820-150069935
  hypo
  thyroid vs. melanoma

SEQ ID NO: 480101 - DNA, 113 bp, Homo sapiens; identical to SEQ ID NO: 479455
  chr7:150714968-150715081
  hypo
  thyroid vs. anorectal,myeloid_neoplasm

SEQ ID NO: 480102 - DNA, 296 bp, Homo sapiens; identical to SEQ ID NO: 479456
  chr7:150715323-150715619
  hypo
  thyroid vs. anorectal,myeloid_neoplasm

SEQ ID NO: 480103 - DNA, 341 bp, Homo sapiens; identical to SEQ ID NO: 465751
  chr7:150758626-150758967
  hypo
  thyroid vs. multiple_myeloma,prostate,cervical, non_cancer,uterine,lymphoid_neoplasm,bladder_and_urothelial, myeloid_neoplasm

SEQ ID NO: 480104 - DNA, 33 bp, Homo sapiens; identical to SEQ ID NO: 354144
  chr7:158713060-158713093
  hypo
  thyroid vs. sarcoma,bladder_and_urothelial

SEQ ID NO: 480105 - DNA, 104 bp, Homo sapiens; identical to SEQ ID NO: 339820
  chr8:1724066-1724170
  hypo
  thyroid vs. liver_bileduct

SEQ ID NO: 480106 - DNA, 106 bp, Homo sapiens; identical to SEQ ID NO: 350705
  chr8:8639980-8640086
  hypo
  thyroid vs. lung,ovary,lymphoid_neoplasm,upper_gi

SEQ ID NO: 480107 - DNA, 143 bp, Homo sapiens; identical to SEQ ID NO: 339836
  chr8:8780059-8780202
  hypo
  thyroid vs. liver_bileduct,sarcoma,lung,anorectal,ovary, bladder_and_urothelial,upper_gi

SEQ ID NO: 480108 - DNA, 287 bp, Homo sapiens; identical to SEQ ID NO: 339856
  chr8:22256736-22257023
  hypo
  thyroid vs. ovary

SEQ ID NO: 480109 - DNA, 20 bp, Homo sapiens
  chr8:23020932-23020952
  hypo
  thyroid vs. myeloid_neoplasm,colorectal,multiple_myeloma, cervical
cgaacgaacgaacgaacgaa

SEQ ID NO: 480110 - DNA, 25 bp, Homo sapiens
  chr8:23021107-23021132
  hypo
  thyroid vs. myeloid_neoplasm,colorectal,multiple_myeloma, cervical
cggcccggtcgctcctgcccagccc

SEQ ID NO: 480111 - DNA, 127 bp, Homo sapiens; identical to SEQ ID NO: 345299
  chr8:23021590-23021717
  hypo
  thyroid vs. myeloid_neoplasm,colorectal,multiple_myeloma, cervical

SEQ ID NO: 480112 - DNA, 198 bp, Homo sapiens; identical to SEQ ID NO: 339899
  chr8:48396539-48396737
  hypo
  thyroid vs. anorectal

SEQ ID NO: 480113 - DNA, 553 bp, Homo sapiens; identical to SEQ ID NO: 378565
  chr8:48744128-48744681
  hypo
  thyroid vs. multiple_myeloma

SEQ ID NO: 480114 - DNA, 78 bp, Homo sapiens; identical to SEQ ID NO: 339978
  chr8:95848311-95848389
  hypo
  thyroid vs. bladder_and_urothelial,liver_bileduct, lymphoid_neoplasm,melanoma,lung,breast,head_and_neck,uterine

SEQ ID NO: 480115 - DNA, 76 bp, Homo sapiens; identical to SEQ ID NO: 339988
  chr8:100851164-100851240
  hypo
  thyroid vs. cervical,bladder_and_urothelial, head_and_neck,breast,renal,lung,prostate,sarcoma,non_cancer, pancreas_gallbladder,melanoma

SEQ ID NO: 480116 - DNA, 160 bp, Homo sapiens; identical to SEQ ID NO: 339991
  chr8:102190390-102190550
  hypo
  thyroid vs. pancreas_gallbladder,ovary,upper_gi

SEQ ID NO: 480117 - DNA, 335 bp, Homo sapiens; identical to SEQ ID NO: 117170
  chr8:125985496-125985831
  hypo
  thyroid vs. uterine

SEQ ID NO: 480118 - DNA, 62 bp, Homo sapiens; identical to SEQ ID NO: 457194
  chr8:128888848-128888910
  hypo
  thyroid vs. melanoma,sarcoma,multiple_myeloma,non_cancer, colorectal

SEQ ID NO: 480119 - DNA, 43 bp, Homo sapiens; identical to SEQ ID NO: 345948
  chr8:128889422-128889465
  hypo
  thyroid vs. melanoma,sarcoma,multiple_myeloma,non_cancer, colorectal

SEQ ID NO: 480120 - DNA, 159 bp, Homo sapiens; identical to SEQ ID NO: 340032
  chr8:131064030-131064189
  hypo
  thyroid vs. colorectal,bladder_and_urothelial, head_and_neck,renal,prostate,cervical,uterine,non_cancer, melanoma,pancreas_gallbladder,multiple_myeloma,sarcoma, anorectal,lymphoid_neoplasm,breast,ovary,upper_gi,lung,
  CONT. FROM ABOVE: myeloid_neoplasm,liver_bileduct

SEQ ID NO: 480121 - DNA, 482 bp, Homo sapiens; identical to SEQ ID NO: 340048
  chr8:140815079-140815561
  hypo
  thyroid vs. cervical,anorectal,prostate,head_and_neck, breast,uterine,sarcoma,non_cancer,upper_gi,pancreas_gallbladder, bladder_and_urothelial,colorectal,renal,melanoma

SEQ ID NO: 480122 - DNA, 48 bp, Homo sapiens; identical to SEQ ID NO: 340061
  chr8:141525521-141525569
  hypo
  thyroid vs. ovary,upper_gi,renal

SEQ ID NO: 480123 - DNA, 107 bp, Homo sapiens; identical to SEQ ID NO: 345951
  chr8:141534525-141534632
  hypo
  thyroid vs. lung,uterine,bladder_and_urothelial,renal, myeloid_neoplasm,head_and_neck,lymphoid_neoplasm,breast, multiple_myeloma,prostate,anorectal,pancreas_gallbladder, colorectal,non_cancer,sarcoma,cervical,liver_bileduct,ovary,
  CONT. FROM ABOVE: upper_gi

SEQ ID NO: 480124 - DNA, 50 bp, Homo sapiens; identical to SEQ ID NO: 479230
  chr8:141559645-141559695
  hypo
  thyroid vs. anorectal

SEQ ID NO: 480125 - DNA, 35 bp, Homo sapiens; identical to SEQ ID NO: 354256
  chr8:141559724-141559759
  hypo
  thyroid vs. anorectal

SEQ ID NO: 480126 - DNA, 62 bp, Homo sapiens; identical to SEQ ID NO: 354259
  chr8:141623736-141623798
  hypo
  thyroid vs. liver_bileduct,multiple_myeloma, lymphoid_neoplasm

SEQ ID NO: 480127 - DNA, 270 bp, Homo sapiens; identical to SEQ ID NO: 340143
  chr8:145226085-145226355
  hypo
  thyroid vs. liver_bileduct,bladder_and_urothelial, sarcoma,upper_gi,anorectal,renal,cervical,melanoma,colorectal, non_cancer,head_and_neck,prostate,pancreas_gallbladder,breast, uterine,multiple_myeloma,myeloid_neoplasm

SEQ ID NO: 480128 - DNA, 203 bp, Homo sapiens; identical to SEQ ID NO: 340175
  chr9:7172217-7172420
  hypo
  thyroid vs. ovary,multiple_myeloma,lung, pancreas_gallbladder,liver_bileduct,head_and_neck, lymphoid_neoplasm,uterine,upper_gi

SEQ ID NO: 480129 - DNA, 23 bp, Homo sapiens
  chr9:90386494-90386517
  hypo
  thyroid vs. myeloid_neoplasm,lymphoid_neoplasm,melanoma
cgggacgggggccaccccggtgc

SEQ ID NO: 480130 - DNA, 62 bp, Homo sapiens; identical to SEQ ID NO: 348354
  chr9:91996203-91996265
  hypo
  thyroid vs. uterine,breast,myeloid_neoplasm,upper_gi, non_cancer,pancreas_gallbladder,anorectal,colorectal,melanoma, prostate,cervical

SEQ ID NO: 480131 - DNA, 280 bp, Homo sapiens; identical to SEQ ID NO: 340243
  chr9:96348822-96349102
  hypo
  thyroid vs. liver_bileduct,sarcoma

SEQ ID NO: 480132 - DNA, 140 bp, Homo sapiens
  chr9:96435988-96436128
  hypo
  thyroid vs. bladder_and_urothelial,sarcoma,anorectal, lymphoid_neoplasm,upper_gi,head_and_neck,renal
cgctggctgcccatggtgcccggaagaatgggggtggcagtggcaagagtgcaggcaaacgactgctgaagagggctgccaagaacagtgtcgacctggacgactacgaggaagagcaggaccacctggatgcctgcttc

SEQ ID NO: 480133 - DNA, 150 bp, Homo sapiens; identical to SEQ ID NO: 340263
  chr9:100849678-100849828
  hypo
  thyroid vs. liver_bileduct,bladder_and_urothelial

SEQ ID NO: 480134 - DNA, 151 bp, Homo sapiens; identical to SEQ ID NO: 340267
  chr9:103493427-103493578
  hypo

SEQ ID NO: 480135 - DNA, 121 bp, Homo sapiens; identical to SEQ ID NO: 365044
  chr9:126153103-126153224
  hypo
  thyroid vs. prostate,breast,anorectal,non_cancer,uterine, colorectal,cervical

SEQ ID NO: 480136 - DNA, 166 bp, Homo sapiens; identical to SEQ ID NO: 354372
  chr9:126158115-126158281
  hypo
  thyroid vs. cervical,myeloid_neoplasm,non_cancer

SEQ ID NO: 480137 - DNA, 109 bp, Homo sapiens; identical to SEQ ID NO: 340316
  chr9:126321044-126321153
  hypo
  thyroid vs. liver_bileduct,head_and_neck,breast, pancreas_gallbladder,melanoma,colorectal,prostate,cervical

SEQ ID NO: 480138 - DNA, 90 bp, Homo sapiens; identical to SEQ ID NO: 340320
  chr9:127120340-127120430
  hypo
  thyroid vs. pancreas_gallbladder,bladder_and_urothelial, multiple_myeloma,uterine,lung,sarcoma,ovary,cervical,prostate, anorectal,head_and_neck,breast,upper_gi,colorectal,non_cancer

SEQ ID NO: 480139 - DNA, 445 bp, Homo sapiens; identical to SEQ ID NO: 340323
  chr9:128200066-128200511
  hypo
  thyroid vs. liver_bileduct,bladder_and_urothelial, pancreas_gallbladder,head_and_neck,anorectal,renal,breast, uterine,upper_gi,colorectal,cervical,melanoma,non_cancer, prostate,sarcoma

SEQ ID NO: 480140 - DNA, 210 bp, Homo sapiens; identical to SEQ ID NO: 479470
  chr9:130639769-130639979
  hypo
  thyroid vs. ovary,upper_gi

SEQ ID NO: 480141 - DNA, 125 bp, Homo sapiens; identical to SEQ ID NO: 372240
  chr9:130640012-130640137
  hypo
  thyroid vs. ovary,upper_gi

SEQ ID NO: 480142 - DNA, 233 bp, Homo sapiens; identical to SEQ ID NO: 340335
  chr9:130907031-130907264
  hypo
  thyroid vs. ovary,lung,head_and_neck, bladder_and_urothelial,sarcoma

SEQ ID NO: 480143 - DNA, 477 bp, Homo sapiens; identical to SEQ ID NO: 340353
  chr9:132874127-132874604
  hypo
  thyroid vs. breast,myeloid_neoplasm,non_cancer, pancreas_gallbladder,upper_gi,prostate,cervical,liver_bileduct, head_and_neck,renal,lymphoid_neoplasm,colorectal, multiple_myeloma,anorectal,bladder_and_urothelial,melanoma,lung,
  CONT. FROM ABOVE: sarcoma

SEQ ID NO: 480144 - DNA, 77 bp, Homo sapiens; identical to SEQ ID NO: 340354
  chr9:132874650-132874727
  hypo
  thyroid vs. multiple_myeloma,head_and_neck, myeloid_neoplasm

SEQ ID NO: 480145 - DNA, 108 bp, Homo sapiens; identical to SEQ ID NO: 340359
  chr9:133484764-133484872
  hypo
  thyroid vs. colorectal,anorectal,uterine,melanoma

SEQ ID NO: 480146 - DNA, 133 bp, Homo sapiens; identical to SEQ ID NO: 340365
  chr9:133641518-133641651
  hypo
  thyroid vs. myeloid_neoplasm

SEQ ID NO: 480147 - DNA, 211 bp, Homo sapiens; identical to SEQ ID NO: 340402
  chr9:136667535-136667746
  hypo
  thyroid vs. lung,ovary

SEQ ID NO: 480148 - DNA, 217 bp, Homo sapiens; identical to SEQ ID NO: 372289
  chr9:139440686-139440903
  hypo
  thyroid vs. ovary

SEQ ID NO: 480149 - DNA, 216 bp, Homo sapiens; identical to SEQ ID NO: 365170
  chr9:139901954-139902170
  hypo
  thyroid vs. cervical,liver_bileduct,anorectal, lymphoid_neoplasm,non_cancer,breast

SEQ ID NO: 480150 - DNA, 233 bp, Homo sapiens; identical to SEQ ID NO: 340488
  chr9:140623363-140623596
  hypo
  thyroid vs. bladder_and_urothelial,pancreas_gallbladder, melanoma,sarcoma,myeloid_neoplasm,uterine,anorectal, lymphoid_neoplasm,lung,renal,cervical,non_cancer,head_and_neck, breast,ovary,colorectal,prostate,liver_bileduct,upper_gi,
  CONT. FROM ABOVE: multiple_myeloma

SEQ ID NO: 480151 - DNA, 232 bp, Homo sapiens; identical to SEQ ID NO: 340489
  chr9:140645189-140645421
  hypo
  thyroid vs. pancreas_gallbladder,breast,head_and_neck

SEQ ID NO: 480152 - DNA, 480 bp, Homo sapiens; identical to SEQ ID NO: 454075
  chr9:140708213-140708693
  hypo
  thyroid vs. renal

SEQ ID NO: 480153 - DNA, 216 bp, Homo sapiens; identical to SEQ ID NO: 454076
  chr9:140708771-140708987
  hypo
  thyroid vs. renal

SEQ ID NO: 480154 - DNA, 621 bp, Homo sapiens; identical to SEQ ID NO: 352672
  chrX:40014669-40015290
  hypo
  thyroid vs. lung,liver_bileduct,lymphoid_neoplasm, upper_gi,head_and_neck,bladder_and_urothelial,prostate,renal, myeloid_neoplasm,cervical,colorectal,anorectal

SEQ ID NO: 480155 - DNA, 85 bp, Homo sapiens; identical to SEQ ID NO: 458438
  chrX:123094093-123094178
  hypo
  thyroid vs. upper_gi

SEQ ID NO: 480156 - DNA, 87 bp, Homo sapiens; identical to SEQ ID NO: 362175
  chrX:123094335-123094422
  hypo
  thyroid vs. upper_gi

SEQ ID NO: 480157 - DNA, 62 bp, Homo sapiens; identical to SEQ ID NO: 344926
  NW_001839407.1_18933-24809:4240-4302
  hypo
  thyroid vs. liver_bileduct,ovary

SEQ ID NO: 480158 - DNA, 60 bp, Homo sapiens; identical to SEQ ID NO: 452707
  AC241851.2_88-34049:15074-15134
  hyper
  upper_gi vs. bladder_and_urothelial

SEQ ID NO: 480159 - DNA, 43 bp, Homo sapiens; identical to SEQ ID NO: 362192
  AC241851.2_88-34049:15553-15596
  hyper
  upper_gi vs. bladder_and_urothelial

SEQ ID NO: 480160 - DNA, 426 bp, Homo sapiens; identical to SEQ ID NO: 457245
  chr1:9711649-9712075
  hyper
  upper_gi vs. prostate,lymphoid_neoplasm,head_and_neck, sarcoma,multiple_myeloma,bladder_and_urothelial,non_cancer, myeloid_neoplasm,lung,uterine,thyroid,breast,cervical,ovary

SEQ ID NO: 480161 - DNA, 53 bp, Homo sapiens; identical to SEQ ID NO: 462206
  chr1:11538821-11538874
  hyper
  upper_gi vs. cervical,colorectal,melanoma,anorectal, prostate,breast,head_and_neck,ovary,uterine

SEQ ID NO: 480162 - DNA, 64 bp, Homo sapiens; identical to SEQ ID NO: 346318
  chr1:12123950-12124014
  hyper
  upper_gi vs. lymphoid_neoplasm

SEQ ID NO: 480163 - DNA, 3 bp, Homo sapiens
  chr1:14027196-14027199
  hyper
  upper_gi vs. colorectal,head_and_neck,lung,breast, anorectal,lymphoid_neoplasm,cervical,ovary,uterine,prostate, bladder_and_urothelial,non_cancer,multiple_myeloma, myeloid_neoplasm,melanoma
gcc

SEQ ID NO: 480164 - DNA, 33 bp, Homo sapiens; identical to SEQ ID NO: 454089
  chr1:25255579-25255612
  hyper
  upper_gi vs. lymphoid_neoplasm,cervical

SEQ ID NO: 480165 - DNA, 7 bp, Homo sapiens
  chr1:25255934-25255941
  hyper
  upper_gi vs. lymphoid_neoplasm,cervical
agccaga

SEQ ID NO: 480166 - DNA, 158 bp, Homo sapiens; identical to SEQ ID NO: 459263
  chr1:34629913-34630071
  hyper
  upper_gi vs. renal

SEQ ID NO: 480167 - DNA, 225 bp, Homo sapiens; identical to SEQ ID NO: 457259
  chr1:34629913-34630138
  hyper
  upper_gi vs. melanoma,sarcoma

SEQ ID NO: 480168 - DNA, 27 bp, Homo sapiens
  chr1:35394588-35394615
  hyper
  upper_gi vs. ovary,bladder_and_urothelial,breast,lung, prostate,sarcoma,lymphoid_neoplasm,uterine
cggcacacacaatcgcccacagaccca

SEQ ID NO: 480169 - DNA, 253 bp, Homo sapiens; identical to SEQ ID NO: 457261
  chr1:35394790-35395043
  hyper
  upper_gi vs. ovary,bladder_and_urothelial,breast,lung, prostate,sarcoma,lymphoid_neoplasm,uterine

SEQ ID NO: 480170 - DNA, 121 bp, Homo sapiens; identical to SEQ ID NO: 459266
  chr1:35394922-35395043
  hyper
  upper_gi vs. ovary,breast,uterine,prostate, myeloid_neoplasm,renal,non_cancer,lung,thyroid,anorectal

SEQ ID NO: 480171 - DNA, 113 bp, Homo sapiens; identical to SEQ ID NO: 346333
  chr1:35396131-35396244
  hyper
  upper_gi vs. uterine,prostate,ovary,myeloid_neoplasm

SEQ ID NO: 480172 - DNA, 424 bp, Homo sapiens; identical to SEQ ID NO: 470917
  chr1:38512641-38513065
  hyper
  upper_gi vs. pancreas_gallbladder

SEQ ID NO: 480173 - DNA, 91 bp, Homo sapiens; identical to SEQ ID NO: 470918
  chr1:38513154-38513245
  hyper
  upper_gi vs. pancreas_gallbladder

SEQ ID NO: 480174 - DNA, 29 bp, Homo sapiens
  chr1:38513318-38513347
  hyper
  upper_gi vs. pancreas_gallbladder
ggcgggcggcagcggttctacagtcctac

SEQ ID NO: 480175 - DNA, 121 bp, Homo sapiens; identical to SEQ ID NO: 465917
  chr1:57110528-57110649
  hyper

SEQ ID NO: 480176 - DNA, 169 bp, Homo sapiens; identical to SEQ ID NO: 465918
  chr1:57110714-57110883
  hyper

SEQ ID NO: 480177 - DNA, 13 bp, Homo sapiens
  chr1:57111498-57111511
  hyper
cgttctgcgaggc

SEQ ID NO: 480178 - DNA, 229 bp, Homo sapiens
  chr1:84543146-84543375
  hyper
  upper_gi vs. liver_bileduct,pancreas_gallbladder
cgaggacaacgtggtgggctgagcgaatacctcaatgtgcgagagaacgaaaagctcgaaccacgaccgtgcctagggaccaggcttttcctgtggccgatgcggggcagatgcagacccagaggccacccttgcgcgcgatctccaacccgacggtgcggctcctctcggacctggagctgtggggagaaggcagccttttagtgaggagccgccgcgtggcgggacg

SEQ ID NO: 480179 - DNA, 659 bp, Homo sapiens; identical to SEQ ID NO: 349271
  chr1:84543409-84544068
  hyper
  upper_gi vs. liver_bileduct,pancreas_gallbladder

SEQ ID NO: 480180 - DNA, 16 bp, Homo sapiens
  chr1:91316222-91316238
  hyper
  upper_gi vs. pancreas_gallbladder
cgtgacagagactaaa

SEQ ID NO: 480181 - DNA, 27 bp, Homo sapiens
  chr1:91317362-91317389
  hyper
  upper_gi vs. pancreas_gallbladder,liver_bileduct
ctctccgggagacgaacgcgaagcgac

SEQ ID NO: 480182 - DNA, 171 bp, Homo sapiens; identical to SEQ ID NO: 455538
  chr1:92948154-92948325
  hyper
  upper_gi vs. colorectal,multiple_myeloma

SEQ ID NO: 480183 - DNA, 142 bp, Homo sapiens; identical to SEQ ID NO: 344962
  chr1:92949466-92949608
  hyper
  upper_gi vs. colorectal,bladder_and_urothelial, multiple_myeloma

SEQ ID NO: 480184 - DNA, 226 bp, Homo sapiens; identical to SEQ ID NO: 452727
  chr1:92949466-92949692
  hyper
  upper_gi vs. colorectal,bladder_and_urothelial, multiple_myeloma,lymphoid_neoplasm

SEQ ID NO: 480185 - DNA, 27 bp, Homo sapiens
  chr1:92949665-92949692
  hyper
  upper_gi vs. colorectal
cggggggaggggggaacagaacacaag

SEQ ID NO: 480186 - DNA, 228 bp, Homo sapiens; identical to SEQ ID NO: 452729
  chr1:92950207-92950435
  hyper
  upper_gi vs. colorectal

SEQ ID NO: 480187 - DNA, 228 bp, Homo sapiens; identical to SEQ ID NO: 452729
  chr1:92950207-92950435
  hyper
  upper_gi vs. colorectal,lymphoid_neoplasm

SEQ ID NO: 480188 - DNA, 14 bp, Homo sapiens
  chr1:101005815-101005829
  hyper
  upper_gi vs. cervical,uterine,head_and_neck
ccttcgaccccagc

SEQ ID NO: 480189 - DNA, 289 bp, Homo sapiens; identical to SEQ ID NO: 452731
  chr1:101702081-101702370
  hyper
  upper_gi vs. sarcoma,uterine

SEQ ID NO: 480190 - DNA, 152 bp, Homo sapiens; identical to SEQ ID NO: 452732
  chr1:101702796-101702948
  hyper
  upper_gi vs. sarcoma,uterine

SEQ ID NO: 480191 - DNA, 393 bp, Homo sapiens; identical to SEQ ID NO: 452733
  chr1:101702796-101703189
  hyper
  upper_gi vs. sarcoma

SEQ ID NO: 480192 - DNA, 840 bp, Homo sapiens
  chr1:107599205-107600045
  hyper
  upper_gi vs. pancreas_gallbladder
cgcgccgccggccgggcgaccccgcaggaagtaggaaggacgagcgcgcactacaagtcccagaagcccccgtttcctggagcccgcgccgtgccgcgctacgcccgccgggagccgggcagagcggccaagatgtcgcagcccaagaaaagaaagcttgagtcggggggcggcggcgaaggaggggagggaactgaagaggaagatggcgcggagcgggaggcggccctggagcgaccccggaggactaagcgggaacgggaccagctgtactacgagtgctactcggacgtttcggtccacgaggagatgatcgcggaccgcgtccgcaccgatgcctaccgcctgggtatccttcggaactgggcagcactgcgaggcaagacggtactggacgtgggcgcgggcaccggcattctgagcatcttctgtgcccaggccggggcccggcgcgtgtacgcggtagaggccagcgccatctggcaacaggcccgggaggtggtgcggttcaacgggctggaggaccgggtgcacgtcctgccgggaccagtggagactgtagagttgccggaacaggtggatgccatcgtgagcgagtggatgggctacggactcctgcacgagtccatgctgagctccgtcctccacgcgcgaaccaagtggctgaaggagggcggtcttctcctgccggcctccgccgagctcttcatagcccccatcagcgaccagatgctggaatggcgcctgggcttctggagccaggtgaagcagcactatggtgtggacatgagctgcctggagggcttcgccacgcgctgtctcatgggccactcggagatc

SEQ ID NO: 480193 - DNA, 689 bp, Homo sapiens
  chr1:107599562-107600251
  hyper
  upper_gi vs. pancreas_gallbladder
cggaactgggcagcactgcgaggcaagacggtactggacgtgggcgcgggcaccggcattctgagcatcttctgtgcccaggccggggcccggcgcgtgtacgcggtagaggccagcgccatctggcaacaggcccgggaggtggtgcggttcaacgggctggaggaccgggtgcacgtcctgccgggaccagtggagactgtagagttgccggaacaggtggatgccatcgtgagcgagtggatgggctacggactcctgcacgagtccatgctgagctccgtcctccacgcgcgaaccaagtggctgaaggagggcggtcttctcctgccggcctccgccgagctcttcatagcccccatcagcgaccagatgctggaatggcgcctgggcttctggagccaggtgaagcagcactatggtgtggacatgagctgcctggagggcttcgccacgcgctgtctcatgggccactcggagatcgttgtgcagggattgtccggcgaggacgtgctggcccggccgcagcgctttgctcagctagagctctcccgcgccggcttggagcaggagctggaggccggagtgggcgggcgcttccgctgcagctgctatggctcggcgcccatgcatggctttgccatctggttccaggtgaccttccctggaggggagtcggagaaacccct

SEQ ID NO: 480194 - DNA, 40 bp, Homo sapiens; identical to SEQ ID NO: 356849
  chr1:107600359-107600399
  hyper
  upper_gi vs. pancreas_gallbladder

SEQ ID NO: 480195 - DNA, 49 bp, Homo sapiens; identical to SEQ ID NO: 349294
  chr1:107684495-107684544
  hyper
  upper_gi vs. breast,prostate,head_and_neck,ovary, lymphoid_neoplasm,multiple_myeloma,bladder_and_urothelial, uterine,anorectal,myeloid_neoplasm,non_cancer,thyroid

SEQ ID NO: 480196 - DNA, 306 bp, Homo sapiens; identical to SEQ ID NO: 452735
  chr1:108506290-108506596
  hyper
  upper_gi vs. multiple_myeloma,lymphoid_neoplasm

SEQ ID NO: 480197 - DNA, 448 bp, Homo sapiens; identical to SEQ ID NO: 457286
  chr1:154297543-154297991
  hyper
  upper_gi vs. lung,lymphoid_neoplasm,multiple_myeloma, sarcoma,melanoma

SEQ ID NO: 480198 - DNA, 73 bp, Homo sapiens; identical to SEQ ID NO: 457287
  chr1:154298038-154298111
  hyper
  upper_gi vs. lung,lymphoid_neoplasm,multiple_myeloma, sarcoma,melanoma

SEQ ID NO: 480199 - DNA, 43 bp, Homo sapiens; identical to SEQ ID NO: 455561
  chr1:156390054-156390097
  hyper
  upper_gi vs. multiple_myeloma,non_cancer,thyroid, lymphoid_neoplasm

SEQ ID NO: 480200 - DNA, 104 bp, Homo sapiens; identical to SEQ ID NO: 455562
  chr1:158083079-158083183
  hyper
  upper_gi vs. colorectal,uterine,ovary,renal,cervical, non_cancer,myeloid_neoplasm,lymphoid_neoplasm,multiple_myeloma, thyroid,sarcoma,lung,anorectal

SEQ ID NO: 480201 - DNA, 135 bp, Homo sapiens; identical to SEQ ID NO: 349354
  chr1:171811643-171811778
  hyper
  upper_gi vs. lung

SEQ ID NO: 480202 - DNA, 5 bp, Homo sapiens
  chr1:214155737-214155742
  hyper
  upper_gi vs. colorectal,liver_bileduct
cgtcc

SEQ ID NO: 480203 - DNA, 116 bp, Homo sapiens; identical to SEQ ID NO: 346393
  chr1:214156950-214157066
  hyper
  upper_gi vs. colorectal,liver_bileduct

SEQ ID NO: 480204 - DNA, 593 bp, Homo sapiens; identical to SEQ ID NO: 473578
  chr1:220701523-220702116
  hyper
  upper_gi vs. cervical,head_and_neck

SEQ ID NO: 480205 - DNA, 7 bp, Homo sapiens
  chr1:225117220-225117227
  hyper
  upper_gi vs. liver_bileduct
cgtcggt

SEQ ID NO: 480206 - DNA, 99 bp, Homo sapiens; identical to SEQ ID NO: 197977
  chr1:225117651-225117750
  hyper
  upper_gi vs. liver_bileduct

SEQ ID NO: 480207 - DNA, 65 bp, Homo sapiens; identical to SEQ ID NO: 466001
  chr1:225117752-225117817
  hyper
  upper_gi vs. liver_bileduct

SEQ ID NO: 480208 - DNA, 45 bp, Homo sapiens; identical to SEQ ID NO: 457308
  chr1:226736488-226736533
  hyper
  upper_gi vs. anorectal

SEQ ID NO: 480209 - DNA, 35 bp, Homo sapiens; identical to SEQ ID NO: 454106
  chr1:226924738-226924773
  hyper
  upper_gi vs. lymphoid_neoplasm

SEQ ID NO: 480210 - DNA, 165 bp, Homo sapiens; identical to SEQ ID NO: 346410
  chr1:230561973-230562138
  hyper
  upper_gi vs. pancreas_gallbladder

SEQ ID NO: 480211 - DNA, 618 bp, Homo sapiens; identical to SEQ ID NO: 357042
  chr1:230561973-230562591
  hyper
  upper_gi vs. liver_bileduct,pancreas_gallbladder

SEQ ID NO: 480212 - DNA, 184 bp, Homo sapiens; identical to SEQ ID NO: 279411
  chr1:235813161-235813345
  hyper
  upper_gi vs. colorectal

SEQ ID NO: 480213 - DNA, 1 bp, Homo sapiens
  chr1:235813621-235813622
  hyper
  upper_gi vs. colorectal
c

SEQ ID NO: 480214 - DNA, 1 bp, Homo sapiens
  chr1:236558377-236558378
  hyper
  upper_gi vs. head_and_neck
c

SEQ ID NO: 480215 - DNA, 836 bp, Homo sapiens; identical to SEQ ID NO: 331173
  chr1:244012299-244013135
  hyper
  upper_gi vs. melanoma

SEQ ID NO: 480216 - DNA, 500 bp, Homo sapiens; identical to SEQ ID NO: 462283
  chr1:244013722-244014222
  hyper
  upper_gi vs. cervical,colorectal,bladder_and_urothelial, head_and_neck,anorectal

SEQ ID NO: 480217 - DNA, 14 bp, Homo sapiens
  chr1:244014671-244014685
  hyper
  upper_gi vs. cervical,colorectal,bladder_and_urothelial, head_and_neck,anorectal
actacgaagagacc

SEQ ID NO: 480218 - DNA, 96 bp, Homo sapiens; identical to SEQ ID NO: 345341
  chr10:1780056-1780152
  hyper
  upper_gi vs. liver_bileduct,head_and_neck,anorectal, melanoma,prostate

SEQ ID NO: 480219 - DNA, 667 bp, Homo sapiens; identical to SEQ ID NO: 455580
  chr10:6621854-6622521
  hyper
  upper_gi vs. colorectal

SEQ ID NO: 480220 - DNA, 87 bp, Homo sapiens; identical to SEQ ID NO: 350979
  chr10:6622706-6622793
  hyper
  upper_gi vs. colorectal

SEQ ID NO: 480221 - DNA, 57 bp, Homo sapiens; identical to SEQ ID NO: 459299
  chr10:7449898-7449955
  hyper
  upper_gi vs. renal,myeloid_neoplasm,thyroid,ovary,breast, prostate,non_cancer,liver_bileduct

SEQ ID NO: 480222 - DNA, 61 bp, Homo sapiens; identical to SEQ ID NO: 459300
  chr10:7453036-7453097
  hyper
  upper_gi vs. renal,melanoma,breast,prostate, multiple_myeloma,ovary,bladder_and_urothelial,myeloid_neoplasm, cervical,lymphoid_neoplasm,thyroid,lung,non_cancer,anorectal

SEQ ID NO: 480223 - DNA, 61 bp, Homo sapiens; identical to SEQ ID NO: 459300
  chr10:7453036-7453097
  hyper
  upper_gi vs. melanoma,breast,prostate,renal, multiple_myeloma,ovary,bladder_and_urothelial,anorectal,thyroid, lung,myeloid_neoplasm,non_cancer,lymphoid_neoplasm,cervical

SEQ ID NO: 480224 - DNA, 42 bp, Homo sapiens; identical to SEQ ID NO: 350990
  chr10:11060746-11060788
  hyper
  upper_gi vs. colorectal

SEQ ID NO: 480225 - DNA, 694 bp, Homo sapiens
  chr10:12391177-12391871
  hyper
  upper_gi vs. liver_bileduct,colorectal, pancreas_gallbladder,head_and_neck
cgcccggcgcttccgagccacgcagaggcgccccctcccgccggagacgggaaagccccggcgcccccagactgggctccgtttccagctcccggaggggctggggctctcccgcgtgcgccccgcacctgccgggggcccgtacccgccctcgccggggctccagggggcacgacggccgtggcccggcgctcttgggaggggagcgggacatccccgaaggcggcgcgctggaggcggggagcggccggggcgcacggagagggcggggagcccgcgggagggggaggagggggaggagggggaggaggcgcgaggtgggggggagcgcggcgggcggcagggagggagcgggagggaggcaagaaagtagcagaaagtgaggctggcaggcggcggcaaaggagccggcgcgcggcggcggcaggaagtctgtgcccgagaacagcagaaataagagccagggagggaccgcggccgcggcggcggcggcgagagcgaaagaggaaactgcagaggaggaagctgcgccgcagcccgagccgcccggcatccccgccgcctctgcgcccgcgccgcgcccccggcgccccctccccagcgcgcccccggccgctcctccgcgccgcgctcgtcggccatggcccgggagaacggcgagagcagctcctcctggaaaaagcaagctgaagac

SEQ ID NO: 480226 - DNA, 166 bp, Homo sapiens
  chr10:12391705-12391871
  hyper
  upper_gi vs. colorectal,liver_bileduct,cervical,lung, pancreas_gallbladder,bladder_and_urothelial,head_and_neck,ovary, anorectal
cgccgcagcccgagccgcccggcatccccgccgcctctgcgcccgcgccgcgcccccggcgccccctccccagcgcgcccccggccgctcctccgcgccgcgctcgtcggccatggcccgggagaacggcgagagcagctcctcctggaaaaagcaagctgaagac

SEQ ID NO: 480227 - DNA, 324 bp, Homo sapiens; identical to SEQ ID NO: 345344
  chr10:12392327-12392651
  hyper
  upper_gi vs. colorectal,liver_bileduct,cervical,lung, pancreas_gallbladder,bladder_and_urothelial,head_and_neck,ovary, anorectal

SEQ ID NO: 480228 - DNA, 4 bp, Homo sapiens
  chr10:13043117-13043121
  hyper
  upper_gi vs. cervical
cggc

SEQ ID NO: 480229 - DNA, 85 bp, Homo sapiens; identical to SEQ ID NO: 359502
  chr10:13043901-13043986
  hyper
  upper_gi vs. cervical

SEQ ID NO: 480230 - DNA, 209 bp, Homo sapiens; identical to SEQ ID NO: 452758
  chr10:17270445-17270654
  hyper
  upper_gi vs. melanoma,uterine,multiple_myeloma

SEQ ID NO: 480231 - DNA, 209 bp, Homo sapiens; identical to SEQ ID NO: 452758
  chr10:17270445-17270654
  hyper
  upper_gi vs. melanoma,uterine,ovary,renal, myeloid_neoplasm,non_cancer,thyroid,multiple_myeloma,sarcoma, lung,lymphoid_neoplasm

SEQ ID NO: 480232 - DNA, 116 bp, Homo sapiens; identical to SEQ ID NO: 345346
  chr10:17272233-17272349
  hyper
  upper_gi vs. melanoma,uterine,sarcoma,ovary, myeloid_neoplasm,multiple_myeloma,thyroid,renal,non_cancer

SEQ ID NO: 480233 - DNA, 260 bp, Homo sapiens; identical to SEQ ID NO: 462295
  chr10:17495133-17495393
  hyper
  upper_gi vs. colorectal

SEQ ID NO: 480234 - DNA, 299 bp, Homo sapiens; identical to SEQ ID NO: 462296
  chr10:17495680-17495979
  hyper
  upper_gi vs. colorectal

SEQ ID NO: 480235 - DNA, 323 bp, Homo sapiens; identical to SEQ ID NO: 462297
  chr10:17495680-17496003
  hyper
  upper_gi vs. colorectal

SEQ ID NO: 480236 - DNA, 15 bp, Homo sapiens
  chr10:17495988-17496003
  hyper
  upper_gi vs. breast,bladder_and_urothelial,ovary, colorectal
cgaccccctccccca

SEQ ID NO: 480237 - DNA, 117 bp, Homo sapiens; identical to SEQ ID NO: 452760
  chr10:18429033-18429150
  hyper
  upper_gi vs. colorectal

SEQ ID NO: 480238 - DNA, 49 bp, Homo sapiens; identical to SEQ ID NO: 351003
  chr10:18430247-18430296
  hyper
  upper_gi vs. colorectal

SEQ ID NO: 480239 - DNA, 265 bp, Homo sapiens
  chr10:20105154-20105419
  hyper
  upper_gi vs. colorectal
cgcgggggagcgtggcgacggcagcgcctcctccgccaccaaactcctggggctccgcgggggcttggggccacctcctcctgagcccggaggaaccctctcccgataggttccagcgtgactccctcccactccacccttttcctttcttcttcctcttttttttttttttttttaaacacatttttttcctggcttcggacctcagactgctgcagccctaaccttcccagggctcagctctttggagctgcccattcctccg

SEQ ID NO: 480240 - DNA, 449 bp, Homo sapiens; identical to SEQ ID NO: 372344
  chr10:20105655-20106104
  hyper
  upper_gi vs. colorectal

SEQ ID NO: 480241 - DNA, 32 bp, Homo sapiens; identical to SEQ ID NO: 345349
  chr10:22626103-22626135
  hyper
  upper_gi vs. prostate,myeloid_neoplasm,non_cancer, uterine,head_and_neck,cervical

SEQ ID NO: 480242 - DNA, 210 bp, Homo sapiens; identical to SEQ ID NO: 466051
  chr10:28031105-28031315
  hyper
  upper_gi vs. pancreas_gallbladder

SEQ ID NO: 480243 - DNA, 226 bp, Homo sapiens
  chr10:28031638-28031864
  hyper
  upper_gi vs. pancreas_gallbladder
gccgcgctcacgcccgggactccctggcgggaggcgaccttcccgactccttgggccaggcgagccgcggggctctggcgaggggctcgagtgaccgaagagaagtccgcggagcctgagcctggactccccgactgctcggcttcgcctgtttctctgcaccgagctcagtcctttttcctcgccctcagccgcgcaccggcacccacagtccggagaggggcaa

SEQ ID NO: 480244 - DNA, 226 bp, Homo sapiens; identical to SEQ ID NO: 480243
  chr10:28031638-28031864
  hyper
  upper_gi vs. pancreas_gallbladder

SEQ ID NO: 480245 - DNA, 116 bp, Homo sapiens; identical to SEQ ID NO: 466052
  chr10:28032744-28032860
  hyper
  upper_gi vs. pancreas_gallbladder

SEQ ID NO: 480246 - DNA, 791 bp, Homo sapiens; identical to SEQ ID NO: 457329
  chr10:31607954-31608745
  hyper
  upper_gi vs. liver_bileduct,bladder_and_urothelial, lymphoid_neoplasm,head_and_neck,pancreas_gallbladder,renal,lung, anorectal,multiple_myeloma

SEQ ID NO: 480247 - DNA, 467 bp, Homo sapiens; identical to SEQ ID NO: 457330
  chr10:31608278-31608745
  hyper
  upper_gi vs. liver_bileduct,renal,lymphoid_neoplasm, head_and_neck,anorectal,bladder_and_urothelial,multiple_myeloma, uterine,sarcoma,lung,prostate,non_cancer,pancreas_gallbladder, myeloid_neoplasm,cervical,ovary,thyroid,breast

SEQ ID NO: 480248 - DNA, 253 bp, Homo sapiens; identical to SEQ ID NO: 455585
  chr10:31609416-31609669
  hyper
  upper_gi vs. renal,lymphoid_neoplasm,anorectal, liver_bileduct,multiple_myeloma,head_and_neck,uterine, bladder_and_urothelial,prostate,sarcoma,non_cancer,ovary, myeloid_neoplasm,pancreas_gallbladder,cervical,thyroid,lung,
  CONT. FROM ABOVE: breast

SEQ ID NO: 480249 - DNA, 253 bp, Homo sapiens; identical to SEQ ID NO: 455585
  chr10:31609416-31609669
  hyper
  upper_gi vs. lymphoid_neoplasm,renal,multiple_myeloma, liver_bileduct,sarcoma,uterine,bladder_and_urothelial, non_cancer,pancreas_gallbladder,myeloid_neoplasm,thyroid

SEQ ID NO: 480250 - DNA, 174 bp, Homo sapiens; identical to SEQ ID NO: 466083
  chr10:44879650-44879824
  hyper
  upper_gi vs. pancreas_gallbladder

SEQ ID NO: 480251 - DNA, 202 bp, Homo sapiens; identical to SEQ ID NO: 459317
  chr10:49731801-49732003
  hyper
  upper_gi vs. ovary,lung

SEQ ID NO: 480252 - DNA, 60 bp, Homo sapiens; identical to SEQ ID NO: 459318
  chr10:50323163-50323223
  hyper
  upper_gi vs. head_and_neck

SEQ ID NO: 480253 - DNA, 94 bp, Homo sapiens; identical to SEQ ID NO: 351040
  chr10:50606762-50606856
  hyper
  upper_gi vs. melanoma,prostate

SEQ ID NO: 480254 - DNA, 194 bp, Homo sapiens; identical to SEQ ID NO: 452770
  chr10:60272362-60272556
  hyper
  upper_gi vs. pancreas_gallbladder

SEQ ID NO: 480255 - DNA, 212 bp, Homo sapiens; identical to SEQ ID NO: 452771
  chr10:60273346-60273558
  hyper
  upper_gi vs. pancreas_gallbladder

SEQ ID NO: 480256 - DNA, 22 bp, Homo sapiens
  chr10:60273587-60273609
  hyper
  upper_gi vs. pancreas_gallbladder
aaggcttaagacaggagctccc

SEQ ID NO: 480257 - DNA, 314 bp, Homo sapiens; identical to SEQ ID NO: 473608
  chr10:60935996-60936310
  hyper
  upper_gi vs. liver_bileduct

SEQ ID NO: 480258 - DNA, 81 bp, Homo sapiens; identical to SEQ ID NO: 473609
  chr10:60936229-60936310
  hyper
  upper_gi vs. liver_bileduct

SEQ ID NO: 480259 - DNA, 73 bp, Homo sapiens; identical to SEQ ID NO: 347093
  chr10:64578688-64578761
  hyper
  upper_gi vs. cervical,anorectal,head_and_neck,breast, bladder_and_urothelial

SEQ ID NO: 480260 - DNA, 490 bp, Homo sapiens; identical to SEQ ID NO: 466090
  chr10:71812611-71813101
  hyper
  upper_gi vs. liver_bileduct

SEQ ID NO: 480261 - DNA, 85 bp, Homo sapiens; identical to SEQ ID NO: 454120
  chr10:79396547-79396632
  hyper
  upper_gi vs. breast,multiple_myeloma,renal,thyroid, non_cancer,uterine

SEQ ID NO: 480262 - DNA, 103 bp, Homo sapiens; identical to SEQ ID NO: 452774
  chr10:83634159-83634262
  hyper
  upper_gi vs. pancreas_gallbladder

SEQ ID NO: 480263 - DNA, 47 bp, Homo sapiens; identical to SEQ ID NO: 359614
  chr10:83634499-83634546
  hyper
  upper_gi vs. pancreas_gallbladder

SEQ ID NO: 480264 - DNA, 91 bp, Homo sapiens; identical to SEQ ID NO: 473612
  chr10:85954199-85954290
  hyper
  upper_gi vs. colorectal,uterine,bladder_and_urothelial

SEQ ID NO: 480265 - DNA, 4 bp, Homo sapiens
  chr10:85955105-85955109
  hyper
  upper_gi vs. colorectal,uterine,bladder_and_urothelial
cctc

SEQ ID NO: 480266 - DNA, 54 bp, Homo sapiens
  chr10:90342577-90342631
  hyper
  upper_gi vs. pancreas_gallbladder,cervical,colorectal, anorectal,prostate,liver_bileduct,multiple_myeloma,renal,ovary, sarcoma,non_cancer,breast,lymphoid_neoplasm,head_and_neck, bladder_and_urothelial,lung
cgcggggtactcctgccgggcccccaccctcgcccccaccctcgccccttcttg

SEQ ID NO: 480267 - DNA, 19 bp, Homo sapiens
  chr10:90968169-90968188
  hyper
  upper_gi vs. uterine,myeloid_neoplasm,cervical,lung, thyroid,ovary
ctccgggcccacggagccc

SEQ ID NO: 480268 - DNA, 1 bp, Homo sapiens
  chr10:92616995-92616996
  hyper
  upper_gi vs. bladder_and_urothelial
c

SEQ ID NO: 480269 - DNA, 82 bp, Homo sapiens; identical to SEQ ID NO: 459323
  chr10:92617016-92617098
  hyper
  upper_gi vs. bladder_and_urothelial

SEQ ID NO: 480270 - DNA, 278 bp, Homo sapiens; identical to SEQ ID NO: 459324
  chr10:92617539-92617817
  hyper
  upper_gi vs. bladder_and_urothelial

SEQ ID NO: 480271 - DNA, 373 bp, Homo sapiens
  chr10:94833649-94834022
  hyper
  upper_gi vs. colorectal
gctggcggcggcggcaggtggcgcgggaggtcgcggcgcgccatggggctcccggcgctgctggccagtgcgctctgcaccttcgtgctgccgctgctgctcttcctggctgcgatcaagctctgggacctgtactgcgtgagcggccgcgaccgcagttgtgccctcccattgccccccgggactatgggcttccccttctttggggaaaccttgcagatggtactgcaggtaagggagggtggggcgggacaggctgcttccccggagcccggcgcggctctgggcttctgctgaagtcggggtaggcgcccccgggaggcatgctattgcggctaggagcagggctggcgggagcgcggcgctccccggc

SEQ ID NO: 480272 - DNA, 385 bp, Homo sapiens
  chr10:94833649-94834034
  hyper
  upper_gi vs. bladder_and_urothelial,prostate
gctggcggcggcggcaggtggcgcgggaggtcgcggcgcgccatggggctcccggcgctgctggccagtgcgctctgcaccttcgtgctgccgctgctgctcttcctggctgcgatcaagctctgggacctgtactgcgtgagcggccgcgaccgcagttgtgccctcccattgccccccgggactatgggcttccccttctttggggaaaccttgcagatggtactgcaggtaagggagggtggggcgggacaggctgcttccccggagcccggcgcggctctgggcttctgctgaagtcggggtaggcgcccccgggaggcatgctattgcggctaggagcagggctggcgggagcgcggcgctccccggcgccccctcatgc

SEQ ID NO: 480273 - DNA, 195 bp, Homo sapiens
  chr10:99530903-99531098
  hyper
  upper_gi vs. pancreas_gallbladder
cgggggataattccggggacgctgggctgagctaggacagcgtgtgtgtgtgtgtgtgggcggagggggggagctgcacctcttggggggttcgcagagctgtgctaggggagctgcagggccgtcggagcgcgcggggacggcggcggcggcgctacctggaggcgcggtggcgggcaggtgcccgaactgcac

SEQ ID NO: 480274 - DNA, 20 bp, Homo sapiens
  chr10:100993468-100993488
  hyper
  upper_gi vs. thyroid,multiple_myeloma
cgtggctaccccagggtctt

SEQ ID NO: 480275 - DNA, 142 bp, Homo sapiens; identical to SEQ ID NO: 372493
  chr10:101295603-101295745
  hyper
  upper_gi vs. colorectal

SEQ ID NO: 480276 - DNA, 17 bp, Homo sapiens
  chr10:105038066-105038083
  hyper
  upper_gi vs. thyroid
cctgccctcttccgcgc

SEQ ID NO: 480277 - DNA, 568 bp, Homo sapiens
  chr10:112257242-112257810
  hyper
  upper_gi vs. head_and_neck,lung,colorectal, bladder_and_urothelial,melanoma
ccctggccggctccctcggccctgctcagcgcggcgcgggcgggttctcagcccacgtccgtgaagctgaaggccggatcgtgcggcgccgccccgccccccacggcgcttcctcctcggtccgcaccgcgagggtcaccgcggccccggagcgcctgggacactcgaccggcagccgcgggtgatgcgcgagtgagtccctcagcgaagcgcggaagagagaacgaagaggcgccttccacttcctctcgctctaacgccggcacccgccccgcgcgtccctcgcccccgctgccccgccccctgcagggcgtggccacggcccgaggggcggggaaacacccatatttggccttatatgggcagccgcgtcacggacggcactcattcacataaaacgctgcgcggccggcggaatccccggcttctagggcggcgagcggccgggctggctatcgagcgagcggggcgggaacgcggagttgcgccgccgctcgggcgccgggctccgtcgcggccgcagccccgcgggtcgccctcccgtgcctcgcccgcggacaccctggcc

SEQ ID NO: 480278 - DNA, 150 bp, Homo sapiens
  chr10:112257978-112258128
  hyper
  upper_gi vs. head_and_neck,lung,colorectal, bladder_and_urothelial,melanoma
ttcgctgcctcgaacgtgcgcggctcgctcaacgtcaacctcaactcggtggtgctgcggcgggcccggggcggcgcggtgtcggcgcgctacgtgctgcccgacgaggcggcgcgcgcgcggctcctgcaggagggcggcggcggcgtc

SEQ ID NO: 480279 - DNA, 170 bp, Homo sapiens
  chr10:112257640-112257810
  hyper
  upper_gi vs. lung,head_and_neck,colorectal,breast
cgctgcgcggccggcggaatccccggcttctagggcggcgagcggccgggctggctatcgagcgagcggggcgggaacgcggagttgcgccgccgctcgggcgccgggctccgtcgcggccgcagccccgcgggtcgccctcccgtgcctcgcccgcggacaccctggcc

SEQ ID NO: 480280 - DNA, 354 bp, Homo sapiens
  chr10:112257978-112258332
  hyper
  upper_gi vs. lung,head_and_neck,colorectal,breast
ttcgctgcctcgaacgtgcgcggctcgctcaacgtcaacctcaactcggtggtgctgcggcgggcccggggcggcgcggtgtcggcgcgctacgtgctgcccgacgaggcggcgcgcgcgcggctcctgcaggagggcggcggcggcgtcgcggccgtggtggtgctggaccagggcagccgccactggcagaagctgcgagaggagagcgccgcgcgtgtcgtcctcacctcgctactcgcttgcctacccgccggcccgcgggtctacttcctcaaaggtgagcgctcggggtccctgccacgctcgcccctccggcgcccccgggtcccctccctgcgccggggcgccctc

SEQ ID NO: 480281 - DNA, 184 bp, Homo sapiens; identical to SEQ ID NO: 351105
  chr10:112258408-112258592
  hyper
  upper_gi vs. lung,head_and_neck,colorectal,breast

SEQ ID NO: 480282 - DNA, 588 bp, Homo sapiens
  chr10:118608718-118609306
  hyper
  upper_gi vs. pancreas_gallbladder,liver_bileduct
aattcggagctaaggctgccgcgctccggcaaaacgcgcttgatgaggtcgttaaagatttccccctctggaaaatcgccagggaaaagtggtgaaaaacgaagccgggagggccctagtctcgggagtctaggaggagcccaacccccggacctaatgccgcagggagaaaagacagagcagcgagcgcaaataccatcctagctccaataaaagggaacgacttttaccgcaggaagaacctaggcctggaagccacgcgagatctgggggtcgggatcacgttgcgttgcctagcgacagcagggacgctcgtgggaccccaggctaaaccccgctgtagccttaaatctcctaccatggaggaagaaggcggcggccgcagctgtgggaccactagggagctgcagaagctgaagcagcaggcgatggagtactaccgggagaacgacgttccgcgcaggctggaagagctgctcaactccaccttctacctccagcctgccgacgtctacgggcacctggtagggacctgggacaagcgctctcctcccgccaacccctctccccccgccccgcgctgcggca

SEQ ID NO: 480283 - DNA, 240 bp, Homo sapiens; identical to SEQ ID NO: 454122
  chr10:118891774-118892014
  hyper
  upper_gi vs. multiple_myeloma

SEQ ID NO: 480284 - DNA, 138 bp, Homo sapiens; identical to SEQ ID NO: 345371
  chr10:122708760-122708898
  hyper
  upper_gi vs. pancreas_gallbladder

SEQ ID NO: 480285 - DNA, 95 bp, Homo sapiens
  chr10:124907174-124907269
  hyper
  upper_gi vs. cervical
cgcagggcgccacggtcccaggagtgccggctttgcccgcccactggggctagaaggggtggagggctgggggaggatggtggagcagcctgtac

SEQ ID NO: 480286 - DNA, 4 bp, Homo sapiens
  chr11:8041149-8041153
  hyper
  upper_gi vs. anorectal,head_and_neck
tagc

SEQ ID NO: 480287 - DNA, 345 bp, Homo sapiens
  chr11:8041149-8041494
  hyper
tagcgagctggcacctctgcccccaccccagctgccccgccagggtcgctccgccgggggaccccgagaaagggcgcggagggggcgccgggaggggcggggcaggggccggggtgggcccctggcgggcggggcgaggagggggcgccttcggctctgggatgcgcccgccggcgtctgcgccccgccggccctccgcagggaccgaggctggccccgggcggagtgtcccgctggctgccggggacccgcgagtcgctgcctgttccgcggggcgagatggcagcctgggccggctgtctgggcgcaggagcggcgctctcgagttgccaggctccgcgcccg

SEQ ID NO: 480288 - DNA, 61 bp, Homo sapiens; identical to SEQ ID NO: 459349
  chr11:9112971-9113032
  hyper
  upper_gi vs. bladder_and_urothelial,cervical

SEQ ID NO: 480289 - DNA, 61 bp, Homo sapiens; identical to SEQ ID NO: 459349
  chr11:9112971-9113032
  hyper
  upper_gi vs. cervical

SEQ ID NO: 480290 - DNA, 172 bp, Homo sapiens
  chr11:17756064-17756236
  hyper
  upper_gi vs. pancreas_gallbladder
cgggcccagacgtctctcggagcccccgcccctggagtggcgttccccgagggcggaccgtgggcgggtcccccgggagcagcaggagccgcgcggggcgggcgcccccagcgccgaggttgagggaggccgggctcggtgcggggctgggaggggggcgcggaatcagggc

SEQ ID NO: 480291 - DNA, 183 bp, Homo sapiens; identical to SEQ ID NO: 359792
  chr11:17756666-17756849
  hyper
  upper_gi vs. pancreas_gallbladder

SEQ ID NO: 480292 - DNA, 174 bp, Homo sapiens; identical to SEQ ID NO: 452792
  chr11:43600280-43600454
  hyper
  upper_gi vs. melanoma,sarcoma,uterine,prostate,ovary, myeloid_neoplasm,lung

SEQ ID NO: 480293 - DNA, 231 bp, Homo sapiens; identical to SEQ ID NO: 462342
  chr11:43964015-43964246
  hyper
  upper_gi vs. lung

SEQ ID NO: 480294 - DNA, 231 bp, Homo sapiens; identical to SEQ ID NO: 462342
  chr11:43964015-43964246
  hyper
  upper_gi vs. lung

SEQ ID NO: 480295 - DNA, 61 bp, Homo sapiens; identical to SEQ ID NO: 359822
  chr11:43965299-43965360
  hyper
  upper_gi vs. bladder_and_urothelial

SEQ ID NO: 480296 - DNA, 42 bp, Homo sapiens; identical to SEQ ID NO: 457371
  chr11:43965463-43965505
  hyper
  upper_gi vs. lung

SEQ ID NO: 480297 - DNA, 141 bp, Homo sapiens; identical to SEQ ID NO: 359824
  chr11:43966061-43966202
  hyper
  upper_gi vs. lung

SEQ ID NO: 480298 - DNA, 28 bp, Homo sapiens
  chr11:45377196-45377224
  hyper
  upper_gi vs. multiple_myeloma,non_cancer
ctgaaggcgaccaacgagagggagggcc

SEQ ID NO: 480299 - DNA, 237 bp, Homo sapiens; identical to SEQ ID NO: 473641
  chr11:61275825-61276062
  hyper
  upper_gi vs. colorectal

SEQ ID NO: 480300 - DNA, 316 bp, Homo sapiens; identical to SEQ ID NO: 462351
  chr11:61276101-61276417
  hyper
  upper_gi vs. colorectal

SEQ ID NO: 480301 - DNA, 316 bp, Homo sapiens; identical to SEQ ID NO: 462351
  chr11:61276101-61276417
  hyper
  upper_gi vs. colorectal,cervical,head_and_neck,breast, uterine

SEQ ID NO: 480302 - DNA, 131 bp, Homo sapiens; identical to SEQ ID NO: 347179
  chr11:106889091-106889222
  hyper
  upper_gi vs. head_and_neck,anorectal,breast,melanoma

SEQ ID NO: 480303 - DNA, 227 bp, Homo sapiens; identical to SEQ ID NO: 462363
  chr11:106889091-106889318
  hyper
  upper_gi vs. melanoma,breast,head_and_neck,anorectal

SEQ ID NO: 480304 - DNA, 168 bp, Homo sapiens; identical to SEQ ID NO: 351253
  chr11:107462735-107462903
  hyper
  upper_gi vs. lung

SEQ ID NO: 480305 - DNA, 19 bp, Homo sapiens
  chr11:110166501-110166520
  hyper
  upper_gi vs. liver_bileduct,pancreas_gallbladder,lung, head_and_neck,lymphoid_neoplasm
cggcctcaagggcccgaga

SEQ ID NO: 480306 - DNA, 443 bp, Homo sapiens
  chr11:110166935-110167378
  hyper
  upper_gi vs. liver_bileduct,pancreas_gallbladder,lung, head_and_neck,lymphoid_neoplasm
caggcacgttcgggccgcggctcagccacgactcgggcagggcctcgcggcccctaccagccccgggaggagcctggccggccgggccgttaccacagtggcgcctcggccagctgggcgcgagcggaggcgcgccaagccctggcggcggcgccacggccgggcagcacgggccccgcaacttcgcgccgccaccttagcgtctccggaggaaccgggagcggggagtgggggaagggagggcgccgcgccttacccggagagcgggcggcttctgcccgccggcgtgtggctggggcgctgcgcggcggcgcggctgcgacagggagggagaagcggtggtgcgagcgctggcccgcgggagacgagaggcgccgccgccaccgcagacagctccgcaatatggccgctcggcgcctccgcgggaaaaggcggggctgccc

SEQ ID NO: 480307 - DNA, 823 bp, Homo sapiens; identical to SEQ ID NO: 351254
  chr11:110166935-110167758
  hyper
  upper_gi vs. liver_bileduct,lung

SEQ ID NO: 480308 - DNA, 399 bp, Homo sapiens; identical to SEQ ID NO: 452805
  chr11:115375434-115375833
  hyper
  upper_gi vs. liver_bileduct

SEQ ID NO: 480309 - DNA, 301 bp, Homo sapiens; identical to SEQ ID NO: 347181
  chr11:115375894-115376195
  hyper
  upper_gi vs. liver_bileduct

SEQ ID NO: 480310 - DNA, 160 bp, Homo sapiens; identical to SEQ ID NO: 457395
  chr11:120435049-120435209
  hyper
  upper_gi vs. ovary,myeloid_neoplasm,uterine,thyroid, non_cancer

SEQ ID NO: 480311 - DNA, 167 bp, Homo sapiens
  chr11:120894634-120894801
  hyper
  upper_gi vs. pancreas_gallbladder,liver_bileduct,lung, head_and_neck,cervical,bladder_and_urothelial,ovary,melanoma, lymphoid_neoplasm,breast,anorectal,colorectal,prostate,renal, uterine,multiple_myeloma,sarcoma,non_cancer
cgagaaagagcagatgaggtgtttgtggtaaagcctaagccagtgcagccatccccgtcgccatggcaaccccagcgcggttggggaggacccgctcctccggcgccccctcccattcacgcagcggacgtgacacgtgcggcggggtcacgtgttgttgttgggcc

SEQ ID NO: 480312 - DNA, 85 bp, Homo sapiens; identical to SEQ ID NO: 345401
  chr11:120895026-120895111
  hyper
  upper_gi vs. pancreas_gallbladder,liver_bileduct,lung, head_and_neck,cervical,bladder_and_urothelial,ovary,melanoma, lymphoid_neoplasm,breast,anorectal,colorectal,prostate,renal, uterine,multiple_myeloma,sarcoma,non_cancer

SEQ ID NO: 480313 - DNA, 129 bp, Homo sapiens; identical to SEQ ID NO: 459366
  chr11:128562635-128562764
  hyper
  upper_gi vs. multiple_myeloma,lymphoid_neoplasm,thyroid

SEQ ID NO: 480314 - DNA, 18 bp, Homo sapiens
  chr11:128563818-128563836
  hyper
  upper_gi vs. multiple_myeloma,lymphoid_neoplasm,sarcoma, thyroid
gagaggagagctcgaggc

SEQ ID NO: 480315 - DNA, 17 bp, Homo sapiens
  chr11:133938756-133938773
  hyper
  upper_gi vs. melanoma
cgccaagttcattgaaa

SEQ ID NO: 480316 - DNA, 161 bp, Homo sapiens; identical to SEQ ID NO: 345407
  chr11:133939437-133939598
  hyper
  upper_gi vs. melanoma

SEQ ID NO: 480317 - DNA, 235 bp, Homo sapiens; identical to SEQ ID NO: 351283
  chr12:1639655-1639890
  hyper
  upper_gi vs. anorectal

SEQ ID NO: 480318 - DNA, 91 bp, Homo sapiens; identical to SEQ ID NO: 466276
  chr12:2161370-2161461
  hyper
  upper_gi vs. colorectal

SEQ ID NO: 480319 - DNA, 126 bp, Homo sapiens; identical to SEQ ID NO: 473658
  chr12:4273746-4273872
  hyper
  upper_gi vs. multiple_myeloma

SEQ ID NO: 480320 - DNA, 86 bp, Homo sapiens; identical to SEQ ID NO: 452813
  chr12:4377809-4377895
  hyper
  upper_gi vs. colorectal,lymphoid_neoplasm,ovary,melanoma, non_cancer,myeloid_neoplasm,thyroid

SEQ ID NO: 480321 - DNA, 142 bp, Homo sapiens; identical to SEQ ID NO: 452814
  chr12:4378558-4378700
  hyper
  upper_gi vs. colorectal,lymphoid_neoplasm,ovary,melanoma, non_cancer,myeloid_neoplasm,thyroid

SEQ ID NO: 480322 - DNA, 245 bp, Homo sapiens; identical to SEQ ID NO: 452815
  chr12:4378558-4378803
  hyper
  upper_gi vs. colorectal,lymphoid_neoplasm,non_cancer, melanoma,myeloid_neoplasm,thyroid,ovary

SEQ ID NO: 480323 - DNA, 88 bp, Homo sapiens; identical to SEQ ID NO: 454142
  chr12:4378715-4378803
  hyper
  upper_gi vs. colorectal,melanoma,lymphoid_neoplasm

SEQ ID NO: 480324 - DNA, 247 bp, Homo sapiens; identical to SEQ ID NO: 455641
  chr12:4379920-4380167
  hyper
  upper_gi vs. colorectal

SEQ ID NO: 480325 - DNA, 202 bp, Homo sapiens; identical to SEQ ID NO: 454143
  chr12:4381232-4381434
  hyper
  upper_gi vs. colorectal

SEQ ID NO: 480326 - DNA, 167 bp, Homo sapiens; identical to SEQ ID NO: 347205
  chr12:4382439-4382606
  hyper
  upper_gi vs. colorectal

SEQ ID NO: 480327 - DNA, 51 bp, Homo sapiens; identical to SEQ ID NO: 454144
  chr12:4382915-4382966
  hyper
  upper_gi vs. colorectal

SEQ ID NO: 480328 - DNA, 210 bp, Homo sapiens; identical to SEQ ID NO: 454145
  chr12:4382999-4383209
  hyper
  upper_gi vs. colorectal

SEQ ID NO: 480329 - DNA, 155 bp, Homo sapiens; identical to SEQ ID NO: 345415
  chr12:4384059-4384214
  hyper
  upper_gi vs. colorectal

SEQ ID NO: 480330 - DNA, 255 bp, Homo sapiens; identical to SEQ ID NO: 455647
  chr12:4384059-4384314
  hyper
  upper_gi vs. colorectal

SEQ ID NO: 480331 - DNA, 79 bp, Homo sapiens; identical to SEQ ID NO: 351309
  chr12:4384533-4384612
  hyper
  upper_gi vs. colorectal

SEQ ID NO: 480332 - DNA, 752 bp, Homo sapiens; identical to SEQ ID NO: 462382
  chr12:8849750-8850502
  hyper
  upper_gi vs. cervical,pancreas_gallbladder,lung, head_and_neck,colorectal,bladder_and_urothelial

SEQ ID NO: 480333 - DNA, 429 bp, Homo sapiens; identical to SEQ ID NO: 462383
  chr12:8850073-8850502
  hyper
  upper_gi vs. cervical,pancreas_gallbladder,head_and_neck, bladder_and_urothelial,lung,anorectal,colorectal,ovary,breast

SEQ ID NO: 480334 - DNA, 311 bp, Homo sapiens; identical to SEQ ID NO: 462384
  chr12:8850744-8851055
  hyper
  upper_gi vs. cervical,pancreas_gallbladder,head_and_neck, bladder_and_urothelial,lung,anorectal,colorectal,ovary,breast

SEQ ID NO: 480335 - DNA, 311 bp, Homo sapiens; identical to SEQ ID NO: 462384
  chr12:8850744-8851055
  hyper
  upper_gi vs. cervical,lung,pancreas_gallbladder, head_and_neck,bladder_and_urothelial,melanoma,anorectal,breast, ovary,sarcoma

SEQ ID NO: 480336 - DNA, 113 bp, Homo sapiens; identical to SEQ ID NO: 347213
  chr12:8851275-8851388
  hyper
  upper_gi vs. cervical,lung,pancreas_gallbladder, head_and_neck,bladder_and_urothelial,melanoma,anorectal,breast, ovary,sarcoma

SEQ ID NO: 480337 - DNA, 117 bp, Homo sapiens; identical to SEQ ID NO: 347220
  chr12:21681020-21681137
  hyper
  upper_gi vs. ovary,breast,uterine,prostate,renal, myeloid_neoplasm,thyroid,sarcoma,non_cancer,multiple_myeloma, melanoma

SEQ ID NO: 480338 - DNA, 38 bp, Homo sapiens; identical to SEQ ID NO: 372957
  chr12:21927952-21927990
  hyper
  upper_gi vs. colorectal

SEQ ID NO: 480339 - DNA, 6 bp, Homo sapiens
  chr12:22488262-22488268
  hyper
  upper_gi vs. anorectal,sarcoma,head_and_neck,breast, ovary,lung,renal,melanoma,bladder_and_urothelial,non_cancer, uterine,thyroid
gcgccc

SEQ ID NO: 480340 - DNA, 118 bp, Homo sapiens; identical to SEQ ID NO: 347221
  chr12:22488705-22488823
  hyper
  upper_gi vs. head_and_neck,anorectal,lung,sarcoma,breast, colorectal,renal,bladder_and_urothelial,prostate,uterine

SEQ ID NO: 480341 - DNA, 253 bp, Homo sapiens; identical to SEQ ID NO: 459373
  chr12:24715505-24715758
  hyper
  upper_gi vs. lung,multiple_myeloma,cervical,sarcoma, uterine,breast,liver_bileduct,renal,non_cancer,head_and_neck, melanoma

SEQ ID NO: 480342 - DNA, 253 bp, Homo sapiens; identical to SEQ ID NO: 459373
  chr12:24715505-24715758
  hyper
  upper_gi vs. lung,multiple_myeloma,sarcoma,uterine, breast,renal,non_cancer,cervical

SEQ ID NO: 480343 - DNA, 23 bp, Homo sapiens
  chr12:25102288-25102311
  hyper
  upper_gi vs. bladder_and_urothelial,lymphoid_neoplasm, multiple_myeloma,uterine,thyroid,non_cancer
ccgtgtaacatttatatggagac

SEQ ID NO: 480344 - DNA, 100 bp, Homo sapiens; identical to SEQ ID NO: 372961
  chr12:28122526-28122626
  hyper
  upper_gi vs. lung

SEQ ID NO: 480345 - DNA, 180 bp, Homo sapiens
  chr12:28122886-28123066
  hyper
  upper_gi vs. liver_bileduct
cgaaccaggccctttcgttccagagccacttgtagcgaaacccacatatatatacatagctgtctgtctacctcctctggtgggctggttgcttccggaaagttgattccacacaccctgagaacaagtttcaagtgcgtgtgtcgtcgatcaggagggccaggtggcggcgagggcggg

SEQ ID NO: 480346 - DNA, 344 bp, Homo sapiens
  chr12:28123205-28123549
  hyper
  upper_gi vs. liver_bileduct
ggagaagtgagctagtcgcaaagaggtggcgccctaggaacgcgcgcggggcgagcgagggcgcaggcgggctggcgggcgggcgcgcggggggcgggggcggcgacgggcggcccgaacgggccccgcgccgcccgagcgagtggaggggagccccgagccgggaatgagcggcgagcggcggagctcccccctcccgcgctgccgaccccggagctgtcaggagctctgccgagccccaccccggagcccgggccctgtcgcgccatccccgtgccgggggcgtgggcgcatccgcttgctccctccaggcccggccggctcctgccggcgcggcggatccg

SEQ ID NO: 480347 - DNA, 77 bp, Homo sapiens; identical to SEQ ID NO: 452819
  chr12:40618264-40618341
  hyper
  upper_gi vs. liver_bileduct

SEQ ID NO: 480348 - DNA, 35 bp, Homo sapiens; identical to SEQ ID NO: 351336
  chr12:40619048-40619083
  hyper
  upper_gi vs. liver_bileduct

SEQ ID NO: 480349 - DNA, 54 bp, Homo sapiens; identical to SEQ ID NO: 459376
  chr12:41086129-41086183
  hyper
  upper_gi vs. lung

SEQ ID NO: 480350 - DNA, 211 bp, Homo sapiens; identical to SEQ ID NO: 459377
  chr12:41086454-41086665
  hyper
  upper_gi vs. lung

SEQ ID NO: 480351 - DNA, 22 bp, Homo sapiens
  chr12:41086692-41086714
  hyper
  upper_gi vs. lung
cgccagcgccgggaactcgccc

SEQ ID NO: 480352 - DNA, 293 bp, Homo sapiens; identical to SEQ ID NO: 452821
  chr12:45270086-45270379
  hyper
  upper_gi vs. bladder_and_urothelial,head_and_neck

SEQ ID NO: 480353 - DNA, 293 bp, Homo sapiens; identical to SEQ ID NO: 452821
  chr12:45270086-45270379
  hyper
  upper_gi vs. head_and_neck

SEQ ID NO: 480354 - DNA, 409 bp, Homo sapiens; identical to SEQ ID NO: 457434
  chr12:48577061-48577470
  hyper
  upper_gi vs. anorectal

SEQ ID NO: 480355 - DNA, 3 bp, Homo sapiens
  chr12:52401537-52401540
  hyper
  upper_gi vs. anorectal,head_and_neck,melanoma
tcc

SEQ ID NO: 480356 - DNA, 54 bp, Homo sapiens; identical to SEQ ID NO: 347231
  chr12:52401605-52401659
  hyper
  upper_gi vs. anorectal,head_and_neck,melanoma

SEQ ID NO: 480357 - DNA, 61 bp, Homo sapiens; identical to SEQ ID NO: 455668
  chr12:54402812-54402873
  hyper
  upper_gi vs. pancreas_gallbladder,colorectal

SEQ ID NO: 480358 - DNA, 386 bp, Homo sapiens; identical to SEQ ID NO: 466329
  chr12:81330352-81330738
  hyper
  upper_gi vs. liver_bileduct,pancreas_gallbladder

SEQ ID NO: 480359 - DNA, 187 bp, Homo sapiens; identical to SEQ ID NO: 466330
  chr12:81330551-81330738
  hyper
  upper_gi vs. pancreas_gallbladder,liver_bileduct

SEQ ID NO: 480360 - DNA, 225 bp, Homo sapiens; identical to SEQ ID NO: 351393
  chr12:81331319-81331544
  hyper
  upper_gi vs. pancreas_gallbladder,liver_bileduct

SEQ ID NO: 480361 - DNA, 851 bp, Homo sapiens; identical to SEQ ID NO: 457458
  chr12:94542238-94543089
  hyper
  upper_gi vs. melanoma,lymphoid_neoplasm,multiple_myeloma, ovary

SEQ ID NO: 480362 - DNA, 373 bp, Homo sapiens; identical to SEQ ID NO: 457459
  chr12:94542716-94543089
  hyper
  upper_gi vs. non_cancer,thyroid,melanoma,prostate, multiple_myeloma,lymphoid_neoplasm,sarcoma

SEQ ID NO: 480363 - DNA, 31 bp, Homo sapiens; identical to SEQ ID NO: 452825
  chr12:94543992-94544023
  hyper
  upper_gi vs. thyroid,non_cancer,melanoma, multiple_myeloma,sarcoma,lymphoid_neoplasm

SEQ ID NO: 480364 - DNA, 86 bp, Homo sapiens; identical to SEQ ID NO: 345430
  chr12:94544052-94544138
  hyper
  upper_gi vs. thyroid,non_cancer,melanoma, multiple_myeloma,sarcoma,lymphoid_neoplasm

SEQ ID NO: 480365 - DNA, 6 bp, Homo sapiens
  chr12:95268000-95268006
  hyper
  upper_gi vs. bladder_and_urothelial,anorectal,ovary, sarcoma
ggtctc

SEQ ID NO: 480366 - DNA, 391 bp, Homo sapiens; identical to SEQ ID NO: 466339
  chr12:99287760-99288151
  hyper
  upper_gi vs. melanoma

SEQ ID NO: 480367 - DNA, 268 bp, Homo sapiens; identical to SEQ ID NO: 452828
  chr12:103351149-103351417
  hyper
  upper_gi vs. multiple_myeloma

SEQ ID NO: 480368 - DNA, 106 bp, Homo sapiens; identical to SEQ ID NO: 459394
  chr12:104850139-104850245
  hyper
  upper_gi vs. pancreas_gallbladder

SEQ ID NO: 480369 - DNA, 349 bp, Homo sapiens; identical to SEQ ID NO: 459395
  chr12:104851545-104851894
  hyper
  upper_gi vs. melanoma,multiple_myeloma, pancreas_gallbladder

SEQ ID NO: 480370 - DNA, 83 bp, Homo sapiens; identical to SEQ ID NO: 345434
  chr12:113495127-113495210
  hyper
  upper_gi vs. multiple_myeloma

SEQ ID NO: 480371 - DNA, 65 bp, Homo sapiens; identical to SEQ ID NO: 462409
  chr12:122688584-122688649
  hyper
  upper_gi vs. cervical,anorectal

SEQ ID NO: 480372 - DNA, 2 bp, Homo sapiens
  chr12:129337804-129337806
  hyper
  upper_gi vs. renal
cg

SEQ ID NO: 480373 - DNA, 134 bp, Homo sapiens
  chr12:133463975-133464109
  hyper
  upper_gi vs. pancreas_gallbladder
agactcggcgcccgccccaccccgcgggccccggcccggccgcccgcgcccacgcagccccgcagcccggcctggacgccggcgggcgccccctcccacggccgcaaccaggtcccccttcgccgcccgccgca

SEQ ID NO: 480374 - DNA, 238 bp, Homo sapiens; identical to SEQ ID NO: 459402
  chr12:133464166-133464404
  hyper
  upper_gi vs. pancreas_gallbladder

SEQ ID NO: 480375 - DNA, 103 bp, Homo sapiens; identical to SEQ ID NO: 459401
  chr12:133464006-133464109
  hyper
  upper_gi vs. pancreas_gallbladder

SEQ ID NO: 480376 - DNA, 238 bp, Homo sapiens; identical to SEQ ID NO: 459402
  chr12:133464166-133464404
  hyper
  upper_gi vs. pancreas_gallbladder

SEQ ID NO: 480377 - DNA, 219 bp, Homo sapiens; identical to SEQ ID NO: 459403
  chr12:133464555-133464774
  hyper
  upper_gi vs. pancreas_gallbladder

SEQ ID NO: 480378 - DNA, 3 bp, Homo sapiens
  chr12:133484584-133484587
  hyper
  upper_gi vs. breast,prostate,bladder_and_urothelial, thyroid
cgc

SEQ ID NO: 480379 - DNA, 72 bp, Homo sapiens
  chr13:25592172-25592244
  hyper
  upper_gi vs. anorectal,breast,multiple_myeloma,prostate
cgcctcccgcctctcagcagaaacgcccaacagaaccgttagaaccagcgagcacgcgcaccttagccggcc

SEQ ID NO: 480380 - DNA, 71 bp, Homo sapiens; identical to SEQ ID NO: 457471
  chr13:27131483-27131554
  hyper
  upper_gi vs. head_and_neck,lung

SEQ ID NO: 480381 - DNA, 4 bp, Homo sapiens
  chr13:29067770-29067774
  hyper
  upper_gi vs. sarcoma
cgat

SEQ ID NO: 480382 - DNA, 23 bp, Homo sapiens
  chr13:37005451-37005474
  hyper
  upper_gi vs. uterine,renal,lung,ovary, bladder_and_urothelial,breast,thyroid
cgattatttcacctggcttgtca

SEQ ID NO: 480383 - DNA, 2 bp, Homo sapiens
  chr13:44361226-44361228
  hyper
  upper_gi vs. pancreas_gallbladder
gc

SEQ ID NO: 480384 - DNA, 319 bp, Homo sapiens
  chr13:44361226-44361545
  hyper
  upper_gi vs. pancreas_gallbladder,bladder_and_urothelial, head_and_neck
gcggggaaggaggatcgaacgcgtgtctcgcttggagaagctgcccacggggcggcagcagaggaggaggggaagtcagcgaggcgcgctagggctccggatcccagcccggcagagccgagcggagcgcgcagccaccgatgcagcagaggcggcgcccgcagcccacggtcgcgctgccccctctcgggaggggccgaggccgctcgctcccgccaccgccgccgcggtcgggactgctctactgggagcgggggaaccgagagagggaccgcacggttgctacggcgaccttggaggggccgggcccgctgaaggg

SEQ ID NO: 480385 - DNA, 62 bp, Homo sapiens; identical to SEQ ID NO: 351471
  chr13:44361578-44361640
  hyper
  upper_gi vs. pancreas_gallbladder,bladder_and_urothelial, head_and_neck

SEQ ID NO: 480386 - DNA, 133 bp, Homo sapiens; identical to SEQ ID NO: 452846
  chr13:46960952-46961085
  hyper
  upper_gi vs. colorectal,uterine,lymphoid_neoplasm,breast, myeloid_neoplasm,thyroid,prostate,bladder_and_urothelial, multiple_myeloma,lung,non_cancer

SEQ ID NO: 480387 - DNA, 135 bp, Homo sapiens; identical to SEQ ID NO: 345444
  chr13:46961683-46961818
  hyper
  upper_gi vs. colorectal,uterine,lymphoid_neoplasm,breast, myeloid_neoplasm,thyroid,prostate,bladder_and_urothelial, multiple_myeloma,lung,non_cancer

SEQ ID NO: 480388 - DNA, 196 bp, Homo sapiens; identical to SEQ ID NO: 351482
  chr13:67805438-67805634
  hyper
  upper_gi vs. liver_bileduct,lung,pancreas_gallbladder

SEQ ID NO: 480389 - DNA, 110 bp, Homo sapiens; identical to SEQ ID NO: 360326
  chr13:96205363-96205473
  hyper
  upper_gi vs. pancreas_gallbladder

SEQ ID NO: 480390 - DNA, 127 bp, Homo sapiens; identical to SEQ ID NO: 459410
  chr13:103046539-103046666
  hyper
  upper_gi vs. pancreas_gallbladder,liver_bileduct, melanoma,renal,anorectal,thyroid,breast

SEQ ID NO: 480391 - DNA, 1 bp, Homo sapiens
  chr13:103047328-103047329
  hyper
  upper_gi vs. pancreas_gallbladder,liver_bileduct, melanoma,renal,anorectal,thyroid,breast
c

SEQ ID NO: 480392 - DNA, 223 bp, Homo sapiens; identical to SEQ ID NO: 454169
  chr13:114776788-114777011
  hyper
  upper_gi vs. pancreas_gallbladder

SEQ ID NO: 480393 - DNA, 439 bp, Homo sapiens; identical to SEQ ID NO: 462437
  chr14:36003004-36003443
  hyper
  upper_gi vs. head_and_neck,anorectal,cervical

SEQ ID NO: 480394 - DNA, 150 bp, Homo sapiens; identical to SEQ ID NO: 462438
  chr14:36003293-36003443
  hyper
  upper_gi vs. head_and_neck,prostate,thyroid

SEQ ID NO: 480395 - DNA, 243 bp, Homo sapiens; identical to SEQ ID NO: 473765
  chr14:42076386-42076629
  hyper
  upper_gi vs. melanoma

SEQ ID NO: 480396 - DNA, 215 bp, Homo sapiens; identical to SEQ ID NO: 473766
  chr14:51562012-51562227
  hyper
  upper_gi vs. renal,prostate,bladder_and_urothelial, myeloid_neoplasm,non_cancer,thyroid,multiple_myeloma,ovary, sarcoma,breast,lung,melanoma,cervical,lymphoid_neoplasm

SEQ ID NO: 480397 - DNA, 224 bp, Homo sapiens; identical to SEQ ID NO: 457524
  chr14:51562012-51562236
  hyper
  upper_gi vs. ovary,bladder_and_urothelial,lung,renal, uterine,pancreas_gallbladder,sarcoma,breast,multiple_myeloma, prostate,head_and_neck,colorectal,myeloid_neoplasm,non_cancer, thyroid,cervical,anorectal,lymphoid_neoplasm

SEQ ID NO: 480398 - DNA, 228 bp, Homo sapiens; identical to SEQ ID NO: 351555
  chr14:53417820-53418048
  hyper
  upper_gi vs. liver_bileduct

SEQ ID NO: 480399 - DNA, 509 bp, Homo sapiens; identical to SEQ ID NO: 360435
  chr14:53417820-53418329
  hyper
  upper_gi vs. liver_bileduct,pancreas_gallbladder

SEQ ID NO: 480400 - DNA, 9 bp, Homo sapiens
  chr14:70654358-70654367
  hyper
  upper_gi vs. thyroid,non_cancer,multiple_myeloma, myeloid_neoplasm,melanoma,sarcoma,renal
cgcgcgcgc

SEQ ID NO: 480401 - DNA, 188 bp, Homo sapiens; identical to SEQ ID NO: 466434
  chr14:92980770-92980958
  hyper
  upper_gi vs. colorectal

SEQ ID NO: 480402 - DNA, 28 bp, Homo sapiens
  chr14:96505311-96505339
  hyper
  upper_gi vs. liver_bileduct
cggactctgggaggagcgttggcgtgga

SEQ ID NO: 480403 - DNA, 210 bp, Homo sapiens
  chr14:96505691-96505901
  hyper
  upper_gi vs. liver_bileduct
tggagccagaagcccagagacagccgagtgcgccgtgcggtctccggacgctcgctgctcagcccgatccccgccaactgtgcaggcggctgacccgcagcggcagcggcagcagcgaggactcgagcgctggctgcagcgacaccatggatctctcctttatggccgcgcaggtaacggggcgtcccccccacgcgccccgggccgcca

SEQ ID NO: 480404 - DNA, 100 bp, Homo sapiens
  chr14:96506053-96506153
  hyper
  upper_gi vs. liver_bileduct
ggggcgggctgcgcgccccgcacccccgcggctcgagctgttcccgcccgggcccctctcgttggcaggaaggctgcgaggagcctgggcagcccgagtc

SEQ ID NO: 480405 - DNA, 210 bp, Homo sapiens; identical to SEQ ID NO: 480403
  chr14:96505691-96505901
  hyper
  upper_gi vs. liver_bileduct

SEQ ID NO: 480406 - DNA, 291 bp, Homo sapiens
  chr14:96506053-96506344
  hyper
  upper_gi vs. liver_bileduct
ggggcgggctgcgcgccccgcacccccgcggctcgagctgttcccgcccgggcccctctcgttggcaggaaggctgcgaggagcctgggcagcccgagtcgcccccttctgcccatcccccactgctgtcccccttctggggtcccggagccctccaaggccgggccagctcagacccgcgcgaacgtggatgggcacacagtctcgcccttccccactctgttttcccgaggcgccagtaatctgtctcttgccggtgacctcgggcgccccctttgccgccgcctgagg

SEQ ID NO: 480407 - DNA, 21 bp, Homo sapiens
  chr14:100259349-100259370
  hyper
  upper_gi vs. pancreas_gallbladder,lung,cervical, liver_bileduct,breast
cgcgcccgctctctcccggcc

SEQ ID NO: 480408 - DNA, 280 bp, Homo sapiens
  chr14:100259401-100259681
  hyper
  upper_gi vs. pancreas_gallbladder,lung,cervical, liver_bileduct,breast
cgcccgccgcgccccgcagcccctgagcccccgtgcgcggaggcggggcctggccaaggggacagcgggcggcagacgcgcccctgcggctcccaggccgcccgggccgcgctccccgcggggaaagaggccgcaggcgcggggaggctcggccccgccccgccacgtccccctcccggcccgggccccgcggccgccgaggccgccccctcgcgggcggagcgggcgctgggctcgcgcggctgcggcggcggcggcgggcccggggttgccatggtaa

SEQ ID NO: 480409 - DNA, 24 bp, Homo sapiens
  chr14:100260262-100260286
  hyper
  upper_gi vs. pancreas_gallbladder,lung,cervical, liver_bileduct,breast
tggaaatgactggatgaagaactc

SEQ ID NO: 480410 - DNA, 41 bp, Homo sapiens; identical to SEQ ID NO: 351622
  chr14:100438971-100439012
  hyper
  upper_gi vs. anorectal,head_and_neck,lung

SEQ ID NO: 480411 - DNA, 78 bp, Homo sapiens; identical to SEQ ID NO: 459428
  chr15:28351681-28351759
  hyper
  upper_gi vs. bladder_and_urothelial

SEQ ID NO: 480412 - DNA, 61 bp, Homo sapiens; identical to SEQ ID NO: 452890
  chr15:29561185-29561246
  hyper
  upper_gi vs. pancreas_gallbladder

SEQ ID NO: 480413 - DNA, 700 bp, Homo sapiens; identical to SEQ ID NO: 347323
  chr15:29561316-29562016
  hyper
  upper_gi vs. pancreas_gallbladder

SEQ ID NO: 480414 - DNA, 838 bp, Homo sapiens; identical to SEQ ID NO: 457555
  chr15:29561523-29562361
  hyper
  upper_gi vs. pancreas_gallbladder,liver_bileduct

SEQ ID NO: 480415 - DNA, 144 bp, Homo sapiens; identical to SEQ ID NO: 466493
  chr15:48009738-48009882
  hyper
  upper_gi vs. colorectal,head_and_neck

SEQ ID NO: 480416 - DNA, 121 bp, Homo sapiens; identical to SEQ ID NO: 466492
  chr15:48009969-48010090
  hyper
  upper_gi vs. colorectal,head_and_neck

SEQ ID NO: 480417 - DNA, 208 bp, Homo sapiens; identical to SEQ ID NO: 351677
  chr15:48010897-48011105
  hyper
  upper_gi vs. colorectal

SEQ ID NO: 480418 - DNA, 119 bp, Homo sapiens; identical to SEQ ID NO: 452893
  chr15:48469946-48470065
  hyper
  upper_gi vs. lung,breast,ovary,renal,prostate,melanoma

SEQ ID NO: 480419 - DNA, 53 bp, Homo sapiens; identical to SEQ ID NO: 452894
  chr15:48470094-48470147
  hyper
  upper_gi vs. lung,breast,ovary,renal,prostate,melanoma

SEQ ID NO: 480420 - DNA, 159 bp, Homo sapiens; identical to SEQ ID NO: 452895
  chr15:48470215-48470374
  hyper
  upper_gi vs. lung,breast,ovary,renal,prostate,melanoma

SEQ ID NO: 480421 - DNA, 1 bp, Homo sapiens
  chr15:48470626-48470627
  hyper
  upper_gi vs. lung,breast,ovary,renal,prostate,melanoma
c

SEQ ID NO: 480422 - DNA, 78 bp, Homo sapiens; identical to SEQ ID NO: 452897
  chr15:48936649-48936727
  hyper
  upper_gi vs. lung,sarcoma,head_and_neck,uterine,prostate, multiple_myeloma,ovary,myeloid_neoplasm,renal,thyroid, non_cancer,melanoma,bladder_and_urothelial,breast

SEQ ID NO: 480423 - DNA, 228 bp, Homo sapiens; identical to SEQ ID NO: 457565
  chr15:53078992-53079220
  hyper
  upper_gi vs. liver_bileduct

SEQ ID NO: 480424 - DNA, 99 bp, Homo sapiens; identical to SEQ ID NO: 452899
  chr15:53080201-53080300
  hyper
  upper_gi vs. liver_bileduct

SEQ ID NO: 480425 - DNA, 2 bp, Homo sapiens
  chr15:53082020-53082022
  hyper
  upper_gi vs. liver_bileduct,pancreas_gallbladder
cc

SEQ ID NO: 480426 - DNA, 34 bp, Homo sapiens; identical to SEQ ID NO: 459436
  chr15:53082144-53082178
  hyper
  upper_gi vs. liver_bileduct,pancreas_gallbladder

SEQ ID NO: 480427 - DNA, 2 bp, Homo sapiens
  chr15:53082020-53082022
  hyper
  upper_gi vs. pancreas_gallbladder,liver_bileduct, anorectal,lung,cervical,head_and_neck
cc

SEQ ID NO: 480428 - DNA, 160 bp, Homo sapiens; identical to SEQ ID NO: 459438
  chr15:53082144-53082304
  hyper
  upper_gi vs. pancreas_gallbladder,liver_bileduct, anorectal,lung,cervical,head_and_neck

SEQ ID NO: 480429 - DNA, 70 bp, Homo sapiens; identical to SEQ ID NO: 459439
  chr15:53082234-53082304
  hyper
  upper_gi vs. pancreas_gallbladder,liver_bileduct, cervical,anorectal,lung,multiple_myeloma,uterine,breast

SEQ ID NO: 480430 - DNA, 783 bp, Homo sapiens
  chr15:60883782-60884565
  hyper
  upper_gi vs. pancreas_gallbladder
cgcgactaacccgcgcccgtcggccctcaccacggtctaacctccgcccctgcccgcggatcccgtgggctgccgagttcctccccacctccatccaccagccaaagtgtcaagcggggtgcgccgcggctccctgggccgcccagagcgtcttggcacgctcgaggcgcccgtctcgctccggcccgcgcgctttcggaagtggccgcggcgggacacagcgcgggacacagcgcggacctgcggcacttgcccggccggcggccgctgaggcgctcggggacgcaggggcagggcgcaaggcctggggcgctgaccagtccccggggatgacatcgcgacaacgcgcacgcacggccctgcccggccgcggcgcctccccgacctaggccggagctgtcccgggtgcgggccctggggaccggccgcgggcgtccccggcttcctctgaactccgcagaccctccccttcctttccgaagcgcggcgactcccggcaaactttcttttgggagacccgcccggtgccaagcggacccaagagactgacaggagccggagggggcagcagagggggatccaccccgtgcgcctttgccccccaatcggaggcaggccgatcccgtggccgggctcaggtggcgccgcggcggtggcccagaaggccctggcagggcccccgcgccgagccccgggcagtacgtgcgttcgggcaggcgcgcccacccctccccctgcgcgccctcctccccgccccccggagccgccagcccacccggcccc

SEQ ID NO: 480431 - DNA, 974 bp, Homo sapiens
  chr15:60884078-60885052
  hyper
  upper_gi vs. pancreas_gallbladder
cgcaaggcctggggcgctgaccagtccccggggatgacatcgcgacaacgcgcacgcacggccctgcccggccgcggcgcctccccgacctaggccggagctgtcccgggtgcgggccctggggaccggccgcgggcgtccccggcttcctctgaactccgcagaccctccccttcctttccgaagcgcggcgactcccggcaaactttcttttgggagacccgcccggtgccaagcggacccaagagactgacaggagccggagggggcagcagagggggatccaccccgtgcgcctttgccccccaatcggaggcaggccgatcccgtggccgggctcaggtggcgccgcggcggtggcccagaaggccctggcagggcccccgcgccgagccccgggcagtacgtgcgttcgggcaggcgcgcccacccctccccctgcgcgccctcctccccgccccccggagccgccagcccacccggccccggcggggcgcccgggctcacctttcatcgctgcgatcacaaaatacatcatttaagccgcggtgcggagagcgcagggagagcggatggtccgaccccggagccccctctgccgccgccgcgccgccgccgcccgagccacagcagcagctgccgcagctgcccgcccgccgagagccatcccgagccataagaggctccatgtgaccggctgacatcacggccgccgctctgtttacaccgcgcccctccgcttcctcccggggcgggaggcgggaggcgggaggcgggaggcaggcgcgccccagcgccgcgccccgccccgcccccgcgggcaggtgagtagcagcggcggctctgctggcccaccccggccgggcctgccctcccgcgccccgggccctcgcccgggcgcccgccttcccctcgccttcgggatcacctgtggccgccggtcgcttttctgcacgcagcgccccgcggaacgc

SEQ ID NO: 480432 - DNA, 40 bp, Homo sapiens
  chr15:61520369-61520409
  hyper
  upper_gi vs. liver_bileduct
cgagagggaaggattcccagagcagaaataagtttcggtg

SEQ ID NO: 480433 - DNA, 59 bp, Homo sapiens
  chr15:61520497-61520556
  hyper
  upper_gi vs. liver_bileduct
ccagcctgggcgccgggctccgaacccccggtctgcaaacttgcgcatctcccctcgcc

SEQ ID NO: 480434 - DNA, 179 bp, Homo sapiens
  chr15:61520576-61520755
  hyper
  upper_gi vs. liver_bileduct
cgaacagctcgcccgcccgcaccccgcttccttcggcccttccttcaaatcccaaacgcaccgccgtgctccaaagaaggtgtccacgtcgcccccagaccccggagcgccccctctccacccccgggacttcccaggtcgctcactcctcccgccccccgcccagatctgagagggac

SEQ ID NO: 480435 - DNA, 61 bp, Homo sapiens
  chr15:61521496-61521557
  hyper
  upper_gi vs. liver_bileduct
ggtaccaaaaaaaaaaaaaaaaaaaaaaaaaaaaaaaaaaaaaaaaaaagaaggagaaggc

SEQ ID NO: 480436 - DNA, 44 bp, Homo sapiens
  chr15:61521578-61521622
  hyper
  upper_gi vs. liver_bileduct
aaaagcaggcggcggcgggcgggcaagcaaaagcgcgagggagc

SEQ ID NO: 480437 - DNA, 4 bp, Homo sapiens
  chr15:61521656-61521660
  hyper
  upper_gi vs. liver_bileduct
cgaa

SEQ ID NO: 480438 - DNA, 2 bp, Homo sapiens
  chr15:61521974-61521976
  hyper
  upper_gi vs. liver_bileduct
ac

SEQ ID NO: 480439 - DNA, 376 bp, Homo sapiens
  chr15:74725128-74725504
  hyper
  upper_gi vs. pancreas_gallbladder
cgaatcggactgggggcggggaggcatttgtgtgcaatgcaggggaggggagatcagttcctcgcggcagaaagcctcaaacccccgcctaaccggctttctgtcccatagtacagggtctaaactgaggtgccctgggggagactccagtcccccaggttcttattatctaccctggcctaaaggctgcacccccgccctagatccaccgcctgggggtcccaacggccgtgccccacccaacgggcactgccccccaacgctggagccgatttctggtgacaactgccacgtgcgggcaaggggggagcggccggtcccggcattgctgaggcagcgccctggtaccccaagccgccgcaccgcaccatgtccc

SEQ ID NO: 480440 - DNA, 360 bp, Homo sapiens
  chr15:74725548-74725908
  hyper
  upper_gi vs. pancreas_gallbladder
cgggccggggcgggggcgggggcaggcggcggggtctttgttcccgctgccgaagcgcggcggcggcggcaaggggtccgcgccccccttgccggcccagcctgcgccccgcgcgccagcagagcccgcagctcaaaaggagggtacccgggttggggtcccaggcggggaaaggtcctccgccgaagcccccgagccagaggacccagagtggctcggggccgagagaggggcccgccccctcccctggcgcccgggcgttgcggctcctggctgccagggacttggtgcgacttagccggggctccggcccccgccgctcgctcgccgcagcgttacagccggctctggtgtgccagc

SEQ ID NO: 480441 - DNA, 66 bp, Homo sapiens
  chr15:74725438-74725504
  hyper
  upper_gi vs. pancreas_gallbladder
cggccggtcccggcattgctgaggcagcgccctggtaccccaagccgccgcaccgcaccatgtccc

SEQ ID NO: 480442 - DNA, 675 bp, Homo sapiens; identical to SEQ ID NO: 373734
  chr15:74725548-74726223
  hyper
  upper_gi vs. pancreas_gallbladder

SEQ ID NO: 480443 - DNA, 61 bp, Homo sapiens; identical to SEQ ID NO: 457569
  chr15:79383268-79383329
  hyper
  upper_gi vs. breast,lung,uterine

SEQ ID NO: 480444 - DNA, 61 bp, Homo sapiens; identical to SEQ ID NO: 457569
  chr15:79383268-79383329
  hyper
  upper_gi vs. prostate,sarcoma,uterine,multiple_myeloma, breast,bladder_and_urothelial,lung,melanoma,thyroid,non_cancer, ovary

SEQ ID NO: 480445 - DNA, 62 bp, Homo sapiens; identical to SEQ ID NO: 351730
  chr15:79384146-79384208
  hyper
  upper_gi vs. prostate,sarcoma,uterine,multiple_myeloma, breast,bladder_and_urothelial,lung,melanoma,thyroid,non_cancer, ovary

SEQ ID NO: 480446 - DNA, 74 bp, Homo sapiens
  chr15:83377928-83378002
  hyper
  upper_gi vs. colorectal,head_and_neck, pancreas_gallbladder,melanoma
cgccttcctgaagaggccccaggctcaagctcaagttcgctgactcagacccctcccccacatttttgggaagc

SEQ ID NO: 480447 - DNA, 126 bp, Homo sapiens
  chr15:83378087-83378213
  hyper
  upper_gi vs. colorectal,head_and_neck, pancreas_gallbladder,melanoma
ctcgaaactgagctggcccatcccccgccagcccctatctgcccccctccgcgtcctaggccggcccctggagccggggtgccagcgctgcccgcgctgggccggggctccaggccgcaggagggg

SEQ ID NO: 480448 - DNA, 55 bp, Homo sapiens
  chr15:83620900-83620955
  hyper
  upper_gi vs. pancreas_gallbladder
cgtggagaacgacaaactgcttagactcacacaggccctggagttgactgcgccc

SEQ ID NO: 480449 - DNA, 319 bp, Homo sapiens; identical to SEQ ID NO: 360724
  chr15:83621407-83621726
  hyper
  upper_gi vs. pancreas_gallbladder

SEQ ID NO: 480450 - DNA, 128 bp, Homo sapiens
  chr15:83875521-83875649
  hyper
  upper_gi vs. head_and_neck,anorectal,cervical
cggggcaccgggaatcgcgctcagggaaaactcaacaagtctagaaggcaaagagatggatgaatgactgccaagaggctcccgctggcctctggatgaccactaccactttccaggatttactgccc

SEQ ID NO: 480451 - DNA, 60 bp, Homo sapiens; identical to SEQ ID NO: 459443
  chr15:83951722-83951782
  hyper
  upper_gi vs. head_and_neck

SEQ ID NO: 480452 - DNA, 228 bp, Homo sapiens; identical to SEQ ID NO: 459444
  chr15:83952822-83953050
  hyper
  upper_gi vs. cervical

SEQ ID NO: 480453 - DNA, 228 bp, Homo sapiens; identical to SEQ ID NO: 459444
  chr15:83952822-83953050
  hyper
  upper_gi vs. cervical

SEQ ID NO: 480454 - DNA, 35 bp, Homo sapiens; identical to SEQ ID NO: 457571
  chr15:89942592-89942627
  hyper
  upper_gi vs. anorectal,uterine

SEQ ID NO: 480455 - DNA, 1 bp, Homo sapiens
  chr15:93631396-93631397
  hyper
  upper_gi vs. lung,head_and_neck
c

SEQ ID NO: 480456 - DNA, 135 bp, Homo sapiens; identical to SEQ ID NO: 473807
  chr15:96960242-96960377
  hyper
  upper_gi vs. liver_bileduct

SEQ ID NO: 480457 - DNA, 100 bp, Homo sapiens; identical to SEQ ID NO: 473808
  chr15:96960409-96960509
  hyper
  upper_gi vs. liver_bileduct

SEQ ID NO: 480458 - DNA, 289 bp, Homo sapiens; identical to SEQ ID NO: 351751
  chr15:96960826-96961115
  hyper
  upper_gi vs. liver_bileduct

SEQ ID NO: 480459 - DNA, 451 bp, Homo sapiens; identical to SEQ ID NO: 459451
  chr16:19566591-19567042
  hyper
  upper_gi vs. melanoma

SEQ ID NO: 480460 - DNA, 10 bp, Homo sapiens
  chr16:23846783-23846793
  hyper
  upper_gi vs. non_cancer,myeloid_neoplasm,thyroid, melanoma,bladder_and_urothelial,multiple_myeloma, lymphoid_neoplasm
cgctcctccc

SEQ ID NO: 480461 - DNA, 400 bp, Homo sapiens; identical to SEQ ID NO: 335306
  chr16:25078047-25078447
  hyper
  upper_gi vs. liver_bileduct

SEQ ID NO: 480462 - DNA, 167 bp, Homo sapiens; identical to SEQ ID NO: 360802
  chr16:25704644-25704811
  hyper
  upper_gi vs. melanoma

SEQ ID NO: 480463 - DNA, 66 bp, Homo sapiens; identical to SEQ ID NO: 466546
  chr16:49316711-49316777
  hyper
  upper_gi vs. colorectal

SEQ ID NO: 480464 - DNA, 156 bp, Homo sapiens; identical to SEQ ID NO: 351799
  chr16:49316844-49317000
  hyper
  upper_gi vs. colorectal

SEQ ID NO: 480465 - DNA, 61 bp, Homo sapiens; identical to SEQ ID NO: 473829
  chr16:56225663-56225724
  hyper
  upper_gi vs. anorectal

SEQ ID NO: 480466 - DNA, 30 bp, Homo sapiens; identical to SEQ ID NO: 459454
  chr16:58498724-58498754
  hyper
  upper_gi vs. head_and_neck,anorectal,breast

SEQ ID NO: 480467 - DNA, 2 bp, Homo sapiens
  chr16:77245974-77245976
  hyper
  upper_gi vs. cervical,head_and_neck,lung,ovary,uterine, prostate
cg

SEQ ID NO: 480468 - DNA, 82 bp, Homo sapiens; identical to SEQ ID NO: 204296
  chr16:77246930-77247012
  hyper
  upper_gi vs. cervical,head_and_neck,lung,prostate

SEQ ID NO: 480469 - DNA, 729 bp, Homo sapiens; identical to SEQ ID NO: 335384
  chr16:77756212-77756941
  hyper
  upper_gi vs. liver_bileduct,colorectal

SEQ ID NO: 480470 - DNA, 49 bp, Homo sapiens; identical to SEQ ID NO: 452920
  chr16:77822069-77822118
  hyper
  upper_gi vs. sarcoma,renal,melanoma,multiple_myeloma

SEQ ID NO: 480471 - DNA, 68 bp, Homo sapiens; identical to SEQ ID NO: 457592
  chr16:80574541-80574609
  hyper
  upper_gi vs. liver_bileduct,bladder_and_urothelial,ovary, renal,colorectal,prostate,sarcoma,multiple_myeloma,melanoma, lung,breast,non_cancer,head_and_neck,lymphoid_neoplasm, myeloid_neoplasm,thyroid

SEQ ID NO: 480472 - DNA, 72 bp, Homo sapiens; identical to SEQ ID NO: 345499
  chr16:80575052-80575124
  hyper
  upper_gi vs. liver_bileduct,bladder_and_urothelial,ovary, renal,colorectal,prostate,sarcoma,multiple_myeloma,melanoma, lung,breast,non_cancer,head_and_neck,lymphoid_neoplasm, myeloid_neoplasm,thyroid

SEQ ID NO: 480473 - DNA, 31 bp, Homo sapiens; identical to SEQ ID NO: 457594
  chr16:80837324-80837355
  hyper
  upper_gi vs. liver_bileduct,bladder_and_urothelial

SEQ ID NO: 480474 - DNA, 539 bp, Homo sapiens; identical to SEQ ID NO: 457595
  chr16:80837424-80837963
  hyper
  upper_gi vs. liver_bileduct,bladder_and_urothelial

SEQ ID NO: 480475 - DNA, 323 bp, Homo sapiens
  chr16:80837640-80837963
  hyper
  upper_gi vs. colorectal,liver_bileduct
cgcattcccagcacgtccggcgccgacttttacctgtactttctgtactcgaggcggctcgtcgggcgagaaacacctccccgggaccgctacctcccccgccccggctccgcccggcttcctccttcccctccaaggccgcaaagtagatggagtaagagagtgtgtgtgcgagagaaagagaaagagggagcgggcgcgggcgccgcgggaggcggcgggcggcgggcggcgggcgggaggcgcgcccggcccccgccaccctccggccgccgccgccgccgccgcgggctcggcaactccggattgcgcccggccccggc

SEQ ID NO: 480476 - DNA, 7 bp, Homo sapiens
  chr16:80838143-80838150
  hyper
  upper_gi vs. colorectal,liver_bileduct
tccggtg

SEQ ID NO: 480477 - DNA, 440 bp, Homo sapiens
  chr16:80838193-80838633
  hyper
  upper_gi vs. colorectal,liver_bileduct
tgttgagtaaactgtgtttttgcagaatgacaggcttgggggctgcctatgcgcagaatcagagcgggcggcggcggggctggcgtaaccggcagcagcggcggcggcggcggcggcggcacgagcgcgggcagcagcgacggccgcgcagcgcgcccgggaggcacggacgcggcccgagcgccgcggcccccgcgacccggcgacccggcggcggtggctgcagccggcaacggctcgccccggcgccgcctgcaggaagccgcccggcgcccgccgccggcccggacgctgctgccactgggcgagtccccgccccccgggagcccggcccggcccccggggcggggaggcgggggctgctgcccggccgcgccccgggggaccggtcccagagtcgactagcgctcgggcccgccccgccaccccgggccggcttc

SEQ ID NO: 480478 - DNA, 5 bp, Homo sapiens
  chr16:80838145-80838150
  hyper
  upper_gi vs. colorectal,liver_bileduct
cggtg

SEQ ID NO: 480479 - DNA, 762 bp, Homo sapiens; identical to SEQ ID NO: 351845
  chr16:80838193-80838955
  hyper
  upper_gi vs. colorectal,liver_bileduct

SEQ ID NO: 480480 - DNA, 246 bp, Homo sapiens
  chr16:86543378-86543624
  hyper
  upper_gi vs. cervical
cgcgtcggggaaggccccggcccagggagcgtttcccgccgcgccgcccgggcggggaaggcggggtccagcgcgcaccggggctgaaccgcgggcggagggcgcattaacacttgctcgccaggttggtggaggcggggcggattctgctggcggccgcggggcggcgagagtgggggctctttaagcgcccaccaacgcgggggcccgaggggggcagggacggagggagggaactccgggagg

SEQ ID NO: 480481 - DNA, 353 bp, Homo sapiens; identical to SEQ ID NO: 462520
  chr16:86543822-86544175
  hyper
  upper_gi vs. cervical

SEQ ID NO: 480482 - DNA, 400 bp, Homo sapiens; identical to SEQ ID NO: 462524
  chr16:89006909-89007309
  hyper
  upper_gi vs. breast,cervical,multiple_myeloma,colorectal, sarcoma

SEQ ID NO: 480483 - DNA, 84 bp, Homo sapiens; identical to SEQ ID NO: 462525
  chr16:89007225-89007309
  hyper
  upper_gi vs. cervical,anorectal,breast,colorectal, lymphoid_neoplasm,multiple_myeloma,sarcoma,melanoma,uterine

SEQ ID NO: 480484 - DNA, 92 bp, Homo sapiens; identical to SEQ ID NO: 462526
  chr16:89007789-89007881
  hyper
  upper_gi vs. cervical,anorectal,breast,colorectal, lymphoid_neoplasm,multiple_myeloma,sarcoma,melanoma,uterine

SEQ ID NO: 480485 - DNA, 211 bp, Homo sapiens; identical to SEQ ID NO: 347401
  chr16:89007995-89008206
  hyper
  upper_gi vs. cervical,anorectal,breast,colorectal, lymphoid_neoplasm,multiple_myeloma,sarcoma,melanoma,uterine

SEQ ID NO: 480486 - DNA, 92 bp, Homo sapiens; identical to SEQ ID NO: 462526
  chr16:89007789-89007881
  hyper
  upper_gi vs. breast,colorectal,lymphoid_neoplasm,sarcoma, melanoma

SEQ ID NO: 480487 - DNA, 374 bp, Homo sapiens; identical to SEQ ID NO: 462529
  chr16:89007995-89008369
  hyper
  upper_gi vs. breast,colorectal,lymphoid_neoplasm,sarcoma, melanoma

SEQ ID NO: 480488 - DNA, 7 bp, Homo sapiens
  chr16:89008592-89008599
  hyper
  upper_gi vs. breast,colorectal,lymphoid_neoplasm,sarcoma, melanoma
cccgccc

SEQ ID NO: 480489 - DNA, 632 bp, Homo sapiens
  chr17:8533862-8534494
  hyper
  upper_gi vs. liver_bileduct,lung,pancreas_gallbladder, bladder_and_urothelial,cervical
gtcctccagagccgcccgggacccctcagcccaggagccattcctccctccacaaactgtcccccagccctgggccgtgcactcggacccgggtagccgcacctctcaccttcagccgaagatggtggcgcgggcgcacgtccccagccgcgaccacagatccagcgcctcagtcccaaacccaccgctgcctccgccgggctcctttagcactgctgctcggggctgccccacccacccctaccctcattgggccagctccacgcccatcaccgccgcccccagacccactggttggtttgcgcgcccatctccaagggaagacgttagcaacccgaacgaagctaccttcccgagtccggctccctccacccacctggaatgacgctcattggctcccgctcccagcccaggccacagaggccccaatctcatgggctggctcttacgcccgtcataggctccgggaggtgcggccggggcagtggcgcgggattggctggctcgtgcgtagatggacagctgaggctggctgaacgcccggcgatcccgcgaggctgcgggtgcgggccccgcggcggccggcgcgctgcgctgacattggctgtgcgggccgcggggcaggtgggccg

SEQ ID NO: 480490 - DNA, 412 bp, Homo sapiens
  chr17:8534082-8534494
  hyper
  upper_gi vs. liver_bileduct,pancreas_gallbladder,lung
cggggctgccccacccacccctaccctcattgggccagctccacgcccatcaccgccgcccccagacccactggttggtttgcgcgcccatctccaagggaagacgttagcaacccgaacgaagctaccttcccgagtccggctccctccacccacctggaatgacgctcattggctcccgctcccagcccaggccacagaggccccaatctcatgggctggctcttacgcccgtcataggctccgggaggtgcggccggggcagtggcgcgggattggctggctcgtgcgtagatggacagctgaggctggctgaacgcccggcgatcccgcgaggctgcgggtgcgggccccgcggcggccggcgcgctgcgctgacattggctgtgcgggccgcggggcaggtgggccg

SEQ ID NO: 480491 - DNA, 350 bp, Homo sapiens; identical to SEQ ID NO: 351883
  chr17:8534582-8534932
  hyper
  upper_gi vs. liver_bileduct,pancreas_gallbladder,lung

SEQ ID NO: 480492 - DNA, 153 bp, Homo sapiens
  chr17:14203859-14204012
  hyper
  upper_gi vs. colorectal,liver_bileduct
cgaatgagtccccggcgtgggttggggggggggttccagtgcctagtgcatctcctaccctgctctccctcctccaaccgcctccctactctgcaacacgtaagcatcacgaaacctcctgcgaaacatctggatggggactggtgtcccaac

SEQ ID NO: 480493 - DNA, 261 bp, Homo sapiens
  chr17:14204242-14204503
  hyper
  upper_gi vs. colorectal,liver_bileduct
ccacaccccctcgtcctgggagcgggttggctgctgagctctcggagaagcgcctgtatttgcatggcgttcggggtttttggtaggtagagcagcccgtcactctggaaggccgggaccgcccactccacctcggtccacagctctcttcctgcgcagttcgcctctgcagcctctgcggggaagtgccggggctgctcgaggctcagttcttaggactgcaaggaggcagccccggcgtgcggcggtgcgcacagtcta

SEQ ID NO: 480494 - DNA, 261 bp, Homo sapiens; identical to SEQ ID NO: 480493
  chr17:14204242-14204503
  hyper
  upper_gi vs. colorectal,pancreas_gallbladder

SEQ ID NO: 480495 - DNA, 169 bp, Homo sapiens
  chr17:14204834-14205003
  hyper
  upper_gi vs. colorectal,pancreas_gallbladder
catggggcagcgcctgagtggcggcagatcttgcctcgatgtccccggccggctcctaccgcagccgccgccgcccccgccgccggtgaggaggaagctcgcgctgctcttcgccatgctctgcgtctggctctatatgttcctgtactcgtgcgccggctcctgcgcc

SEQ ID NO: 480496 - DNA, 33 bp, Homo sapiens; identical to SEQ ID NO: 462542
  chr17:29718746-29718779
  hyper
  upper_gi vs. cervical

SEQ ID NO: 480497 - DNA, 1 bp, Homo sapiens
  chr17:29719289-29719290
  hyper
  upper_gi vs. cervical
c

SEQ ID NO: 480498 - DNA, 64 bp, Homo sapiens; identical to SEQ ID NO: 457611
  chr17:45330951-45331015
  hyper
  upper_gi vs. pancreas_gallbladder,liver_bileduct, anorectal

SEQ ID NO: 480499 - DNA, 120 bp, Homo sapiens; identical to SEQ ID NO: 457612
  chr17:45331313-45331433
  hyper
  upper_gi vs. pancreas_gallbladder,liver_bileduct, anorectal

SEQ ID NO: 480500 - DNA, 90 bp, Homo sapiens; identical to SEQ ID NO: 345527
  chr17:45331675-45331765
  hyper
  upper_gi vs. pancreas_gallbladder,liver_bileduct, anorectal

SEQ ID NO: 480501 - DNA, 61 bp, Homo sapiens; identical to SEQ ID NO: 374197
  chr17:47575254-47575315
  hyper
  upper_gi vs. anorectal

SEQ ID NO: 480502 - DNA, 216 bp, Homo sapiens; identical to SEQ ID NO: 457619
  chr17:56327007-56327223
  hyper
  upper_gi vs. bladder_and_urothelial,anorectal,prostate, lung,head_and_neck

SEQ ID NO: 480503 - DNA, 112 bp, Homo sapiens; identical to SEQ ID NO: 454237
  chr17:61777761-61777873
  hyper
  upper_gi vs. cervical

SEQ ID NO: 480504 - DNA, 76 bp, Homo sapiens; identical to SEQ ID NO: 345537
  chr17:61778423-61778499
  hyper
  upper_gi vs. cervical

SEQ ID NO: 480505 - DNA, 238 bp, Homo sapiens; identical to SEQ ID NO: 345538
  chr18:2848166-2848404
  hyper
  upper_gi vs. uterine

SEQ ID NO: 480506 - DNA, 116 bp, Homo sapiens; identical to SEQ ID NO: 361194
  chr18:5896132-5896248
  hyper
  upper_gi vs. lung

SEQ ID NO: 480507 - DNA, 213 bp, Homo sapiens
  chr18:6729229-6729442
  hyper
  upper_gi vs. colorectal
cgctagcaggagccccaaaggatcccggccggtttccagtttcctagaagcggggatcacacctccccgcgcactcccgacacatgcgcgcgcacgcacacacaggcgcacacacacagacacacaggcgcgcgcacacaggcacacacatggacacacgggcgcgcacacacaggcacaaacacaggcgcacacataggcgcacacacacac

SEQ ID NO: 480508 - DNA, 233 bp, Homo sapiens
  chr18:6729720-6729953
  hyper
  upper_gi vs. colorectal
cgggccgcgccgcccagctgctgacagcctcccggcgcgccggtccatgctggtcccggtctttgttctggggccggcgccgagacatgcgcggctgacgatggaggtggaggactcgggcggcgtggtgctgaccgcctaccactcgtacgcgcgcgcccagccccccaacgccgagtcgcgctgcgcgccccgcgccgcagccagccacccgctcagcaggtacccggagc

SEQ ID NO: 480509 - DNA, 60 bp, Homo sapiens; identical to SEQ ID NO: 374332
  chr18:6730139-6730199
  hyper
  upper_gi vs. colorectal

SEQ ID NO: 480510 - DNA, 22 bp, Homo sapiens
  chr18:7566988-7567010
  hyper
  upper_gi vs. liver_bileduct
cgcggctcgtgacccgggacaa

SEQ ID NO: 480511 - DNA, 416 bp, Homo sapiens; identical to SEQ ID NO: 466678
  chr18:7567335-7567751
  hyper
  upper_gi vs. liver_bileduct

SEQ ID NO: 480512 - DNA, 273 bp, Homo sapiens; identical to SEQ ID NO: 459494
  chr18:7567478-7567751
  hyper
  upper_gi vs. liver_bileduct

SEQ ID NO: 480513 - DNA, 70 bp, Homo sapiens; identical to SEQ ID NO: 352058
  chr18:7568821-7568891
  hyper
  upper_gi vs. liver_bileduct

SEQ ID NO: 480514 - DNA, 928 bp, Homo sapiens; identical to SEQ ID NO: 335756
  chr18:13217150-13218078
  hyper
  upper_gi vs. colorectal

SEQ ID NO: 480515 - DNA, 122 bp, Homo sapiens; identical to SEQ ID NO: 462589
  chr18:24130266-24130388
  hyper
  upper_gi vs. cervical,anorectal

SEQ ID NO: 480516 - DNA, 113 bp, Homo sapiens
  chr18:24764503-24764616
  hyper
  upper_gi vs. liver_bileduct
cgatcgcacctggcctcccggtccccctaacttccctcccacctctcccgcagcctgcgcctgagcctgagccaggtcgcggagtttgagactgacgcaaaggaggcaccccc

SEQ ID NO: 480517 - DNA, 21 bp, Homo sapiens
  chr18:24765168-24765189
  hyper
  upper_gi vs. liver_bileduct
cgcgctccggggcaaactccc

SEQ ID NO: 480518 - DNA, 23 bp, Homo sapiens
  chr18:24765230-24765253
  hyper
  upper_gi vs. liver_bileduct
cgcgccgggagcggggacagctc

SEQ ID NO: 480519 - DNA, 456 bp, Homo sapiens; identical to SEQ ID NO: 473888
  chr18:25756040-25756496
  hyper
  upper_gi vs. liver_bileduct

SEQ ID NO: 480520 - DNA, 378 bp, Homo sapiens; identical to SEQ ID NO: 452942
  chr18:25756118-25756496
  hyper
  upper_gi vs. liver_bileduct

SEQ ID NO: 480521 - DNA, 105 bp, Homo sapiens; identical to SEQ ID NO: 352078
  chr18:25756986-25757091
  hyper
  upper_gi vs. liver_bileduct

SEQ ID NO: 480522 - DNA, 202 bp, Homo sapiens; identical to SEQ ID NO: 452944
  chr18:25756986-25757188
  hyper
  upper_gi vs. liver_bileduct

SEQ ID NO: 480523 - DNA, 42 bp, Homo sapiens; identical to SEQ ID NO: 452945
  chr18:25757146-25757188
  hyper
  upper_gi vs. liver_bileduct

SEQ ID NO: 480524 - DNA, 756 bp, Homo sapiens
  chr18:42258983-42259739
  hyper
  upper_gi vs. pancreas_gallbladder,liver_bileduct, lymphoid_neoplasm,melanoma,colorectal,breast,cervical,anorectal, multiple_myeloma
cgcccagtttcgagagcctatcacagctcacgtctgggcgcgcagtacccccccgacactgctcctgttgtgtcagatagtggcagtgttgagcccaggaatacgcgcggagcccgcggcgatccccgcggccgctcagtcttcgcggcggactccggcgcgcaggagccactgggccgcaagggcgccggggagcgggaggggcgctgggggcggcaaggggtcccagatcccaggccacgaactgttttccttttccccgggcaagagccccgctcccttcaactgacagaaattcactggggcaggggggcgagtggggagagaggtcgctcagggctcgctactggctgcgcctcccccggctctggtctgggaagcggctctgggccctccgggcgagcagcttgggcgccggcgccccctgcgaggaagatcgcggggtgacggtcggtacccgttcggctgggccgcgctgccgctccgatccacctcccttccgcgcccgcgccctcccccttcctttcactaggagtccgggattcggagagggcgcgggaggcaggcacacgggcccgaccccactccagcgctcaccggggacgcgggcgggcggcgacgggacgcggcgggggcgcggggcgggcgcggccatggagcagcagcggcggcggcggcggcggcggcggcaacactagcgaccgcgggcggacgagcgggcgggcagggccgccgggctcagcggaccgaactgca

SEQ ID NO: 480525 - DNA, 361 bp, Homo sapiens
  chr18:42259378-42259739
  hyper
  upper_gi vs. pancreas_gallbladder,liver_bileduct, lymphoid_neoplasm,breast,cervical,melanoma,anorectal,colorectal, multiple_myeloma,prostate
cgggcgagcagcttgggcgccggcgccccctgcgaggaagatcgcggggtgacggtcggtacccgttcggctgggccgcgctgccgctccgatccacctcccttccgcgcccgcgccctcccccttcctttcactaggagtccgggattcggagagggcgcgggaggcaggcacacgggcccgaccccactccagcgctcaccggggacgcgggcgggcggcgacgggacgcggcgggggcgcggggcgggcgcggccatggagcagcagcggcggcggcggcggcggcggcggcaacactagcgaccgcgggcggacgagcgggcgggcagggccgccgggctcagcggaccgaactgca

SEQ ID NO: 480526 - DNA, 121 bp, Homo sapiens
  chr18:42259821-42259942
  hyper
  upper_gi vs. pancreas_gallbladder,liver_bileduct, lymphoid_neoplasm,breast,cervical,melanoma,anorectal,colorectal, multiple_myeloma,prostate
atcctttgaagaaaagcaaaaaaaaaaaaaaaaaaaaaaaaaaaagcaaaaaaagaaaaagcattgatcggagagacggggatatatatatatatatatatatatatatatatataaaatt

SEQ ID NO: 480527 - DNA, 268 bp, Homo sapiens
  chr18:42260083-42260351
  hyper
  upper_gi vs. pancreas_gallbladder,liver_bileduct, lymphoid_neoplasm,breast,cervical,melanoma,anorectal,colorectal, multiple_myeloma,prostate
tgatatctctctccataaatcggtggcgcggcggaggcggcagagtcgggcgggaagcgcggggccggccggggcgcccgccgctcgccgccgcctccgcgcgcccgggggccccggcgccccccgagctagggcggccagctcgcggctcgccgtttgacagatgctcatcgccatggagttgccgcagcagcacctttgggggctcgggcgagcgacgggagccgggatctgagcgagcgccggggccagcggagccggagccgcc

SEQ ID NO: 480528 - DNA, 53 bp, Homo sapiens
  chr18:42259889-42259942
  hyper
  upper_gi vs. pancreas_gallbladder,liver_bileduct, lymphoid_neoplasm,melanoma,cervical,breast,ovary, multiple_myeloma,prostate,colorectal,uterine
cggagagacggggatatatatatatatatatatatatatatatatataaaatt

SEQ ID NO: 480529 - DNA, 711 bp, Homo sapiens; identical to SEQ ID NO: 347500
  chr18:42260083-42260794
  hyper
  upper_gi vs. pancreas_gallbladder,liver_bileduct, lymphoid_neoplasm,melanoma,cervical,breast,ovary, multiple_myeloma,prostate,colorectal,uterine

SEQ ID NO: 480530 - DNA, 880 bp, Homo sapiens
  chr18:42260367-42261247
  hyper
  upper_gi vs. pancreas_gallbladder,liver_bileduct, cervical,lymphoid_neoplasm
cgcgcggcgaccttggcccgggagcccgggcgcccagcctccctccgcgccgcgggcccccgcactcccggaaccgggggcgacgtgtgtgccctgcatgcaaaagttcacgtcgccttgctgggtctttgactttgcacccggcgggaagggggagaccgggccgagggggcgggatgccggtccgggcgaggttgcaggagatgggcgcgattccggcgggccggcgggtgggcggcgatgctggctcaattggagtggctcgttggtggcggcgatggtggaagctttgggctggagggctgggagcttattgagtttcgcctaatctgatctaccccccctccgccccccgccttttgcaccctccctcggtcctgcagccggctggcggggctggcgggtttggcgttggtggagtggactcgggagggggagggggtaaggaaaggggtgggaaggcaggattttttttttctctctttgtaacttgcaggttaagtggagctagagagctacattgtaacctagttggatttttttggggggggaatgtatcagaatctaacgtgtcgttaatagaaagaagaacaggcaagaagtggtccagccggcgaaggttggtgtgtgcttgtgttgtgcctgtgtgttagtctttttcttaaaaatcttaatcaatggatttgagtctctttcttgtgctctctggttttgggactctgaaaagataggaattcccttaaaagcagacgaatgcctttttgaaagcacgcattgtgtgcgtttctagaggagccgtgggcttgggaatgaacggcaggcttccccgttcggtggtttccagtgggaaatcactccggaaagggaacccttcggtatc

SEQ ID NO: 480531 - DNA, 190 bp, Homo sapiens; identical to SEQ ID NO: 361257
  chr18:43914608-43914798
  hyper
  upper_gi vs. bladder_and_urothelial

SEQ ID NO: 480532 - DNA, 80 bp, Homo sapiens; identical to SEQ ID NO: 452959
  chr18:44335955-44336035
  hyper
  upper_gi vs. sarcoma,myeloid_neoplasm

SEQ ID NO: 480533 - DNA, 14 bp, Homo sapiens
  chr18:44337138-44337152
  hyper
  upper_gi vs. myeloid_neoplasm,thyroid,non_cancer,sarcoma
caggggctgggcgc

SEQ ID NO: 480534 - DNA, 448 bp, Homo sapiens; identical to SEQ ID NO: 361288
  chr18:53256017-53256465
  hyper
  upper_gi vs. head_and_neck,cervical,anorectal

SEQ ID NO: 480535 - DNA, 53 bp, Homo sapiens; identical to SEQ ID NO: 352104
  chr18:53257322-53257375
  hyper
  upper_gi vs. cervical

SEQ ID NO: 480536 - DNA, 45 bp, Homo sapiens; identical to SEQ ID NO: 455808
  chr18:53446783-53446828
  hyper
  upper_gi vs. anorectal,head_and_neck,cervical

SEQ ID NO: 480537 - DNA, 101 bp, Homo sapiens; identical to SEQ ID NO: 454266
  chr18:60985398-60985499
  hyper
  upper_gi vs. colorectal,melanoma,anorectal,renal,breast, multiple_myeloma,ovary,non_cancer

SEQ ID NO: 480538 - DNA, 75 bp, Homo sapiens; identical to SEQ ID NO: 347516
  chr18:60985973-60986048
  hyper
  upper_gi vs. colorectal,melanoma,anorectal,renal,breast, multiple_myeloma,ovary,non_cancer

SEQ ID NO: 480539 - DNA, 82 bp, Homo sapiens
  chr18:61603403-61603485
  hyper
  upper_gi vs. pancreas_gallbladder
cgagcgcaatgcagcgcgcgttcctcctcctgggcgcccatcctcggctgctgcctcttcctttcgggccccgggacctgac

SEQ ID NO: 480540 - DNA, 201 bp, Homo sapiens
  chr18:61603701-61603902
  hyper
  upper_gi vs. pancreas_gallbladder
ggtctccttagggtgtatgaggtgtcccttgacccttctctccccgaagtggacatcaaggtgatcctccccccatgacctcctacccgtggcatcctgcgacccccacccccgctgccagcccagtcctcccaggagccctcgaggggagcacggggttggctgaggggatgggggagcttccgcggacacagtccagcc

SEQ ID NO: 480541 - DNA, 208 bp, Homo sapiens; identical to SEQ ID NO: 352115
  chr18:61603985-61604193
  hyper
  upper_gi vs. pancreas_gallbladder

SEQ ID NO: 480542 - DNA, 65 bp, Homo sapiens; identical to SEQ ID NO: 352116
  chr18:70211724-70211789
  hyper
  upper_gi vs. liver_bileduct

SEQ ID NO: 480543 - DNA, 291 bp, Homo sapiens; identical to SEQ ID NO: 454270
  chr19:813406-813697
  hyper
  upper_gi vs. pancreas_gallbladder

SEQ ID NO: 480544 - DNA, 322 bp, Homo sapiens; identical to SEQ ID NO: 352133
  chr19:813830-814152
  hyper
  upper_gi vs. pancreas_gallbladder

SEQ ID NO: 480545 - DNA, 116 bp, Homo sapiens; identical to SEQ ID NO: 345560
  chr19:1979018-1979134
  hyper
  upper_gi vs. liver_bileduct

SEQ ID NO: 480546 - DNA, 542 bp, Homo sapiens
  chr19:5339897-5340439
  hyper
  upper_gi vs. cervical
cgtgcgcgtctgcctgccagagcccctggggctgggggctgaggctcgcccctgggtggggaggctggaagggggcgccgaggccgcagaagggtggggcaatgcccgagtgccggaggggcgacctcccataaggcaacgacagggcccggagtgttccaggggagacggcgtagactagggggtctccaggggagggagacccggagagggaaggcggcgggcgcagcagccctggagccaccccgcctggagccacccgtcccggctcctctccgctccggggcgcccgcatgccccccatcccccggcacagcgccccctgcctccaggacccgcccggggacccgggccgggcgccgccggggccggcaccggctccgcacacacgcgcgcccccctccgcgcctctgccccgcccgcagcccggggtggtgcagccggcggcgctgggcagcttccaatgccgcgctctgggcgcttccagcccagccccctcccacgccgcggacgaagcccccccagcaccccctgccgagcgc

SEQ ID NO: 480547 - DNA, 66 bp, Homo sapiens; identical to SEQ ID NO: 459508
  chr19:6590260-6590326
  hyper
  upper_gi vs. lymphoid_neoplasm

SEQ ID NO: 480548 - DNA, 323 bp, Homo sapiens; identical to SEQ ID NO: 361399
  chr19:6590881-6591204
  hyper
  upper_gi vs. lymphoid_neoplasm

SEQ ID NO: 480549 - DNA, 685 bp, Homo sapiens; identical to SEQ ID NO: 335930
  chr19:8274278-8274963
  hyper
  upper_gi vs. cervical,lymphoid_neoplasm

SEQ ID NO: 480550 - DNA, 485 bp, Homo sapiens; identical to SEQ ID NO: 462606
  chr19:10529649-10530134
  hyper
  upper_gi vs. bladder_and_urothelial,head_and_neck

SEQ ID NO: 480551 - DNA, 111 bp, Homo sapiens; identical to SEQ ID NO: 352184
  chr19:10530526-10530637
  hyper
  upper_gi vs. bladder_and_urothelial,head_and_neck

SEQ ID NO: 480552 - DNA, 631 bp, Homo sapiens; identical to SEQ ID NO: 457670
  chr19:10530654-10531285
  hyper
  upper_gi vs. sarcoma,breast,uterine,prostate, head_and_neck

SEQ ID NO: 480553 - DNA, 139 bp, Homo sapiens; identical to SEQ ID NO: 457671
  chr19:10531146-10531285
  hyper
  upper_gi vs. prostate,sarcoma,uterine,breast, head_and_neck

SEQ ID NO: 480554 - DNA, 189 bp, Homo sapiens; identical to SEQ ID NO: 347537
  chr19:11593453-11593642
  hyper
  upper_gi vs. anorectal

SEQ ID NO: 480555 - DNA, 31 bp, Homo sapiens; identical to SEQ ID NO: 452988
  chr19:12163025-12163056
  hyper
  upper_gi vs. colorectal,bladder_and_urothelial

SEQ ID NO: 480556 - DNA, 118 bp, Homo sapiens; identical to SEQ ID NO: 452989
  chr19:12163331-12163449
  hyper
  upper_gi vs. colorectal,bladder_and_urothelial

SEQ ID NO: 480557 - DNA, 16 bp, Homo sapiens
  chr19:12203656-12203672
  hyper
  upper_gi vs. multiple_myeloma,sarcoma,myeloid_neoplasm, breast,prostate
ctgaggtcaggagttc

SEQ ID NO: 480558 - DNA, 3 bp, Homo sapiens
  chr19:12266891-12266894
  hyper
  upper_gi vs. bladder_and_urothelial,sarcoma
cga

SEQ ID NO: 480559 - DNA, 106 bp, Homo sapiens; identical to SEQ ID NO: 459516
  chr19:17392397-17392503
  hyper
  upper_gi vs. anorectal

SEQ ID NO: 480560 - DNA, 69 bp, Homo sapiens; identical to SEQ ID NO: 347569
  chr19:20011652-20011721
  hyper
  upper_gi vs. pancreas_gallbladder

SEQ ID NO: 480561 - DNA, 47 bp, Homo sapiens; identical to SEQ ID NO: 452998
  chr19:20011723-20011770
  hyper
  upper_gi vs. pancreas_gallbladder

SEQ ID NO: 480562 - DNA, 18 bp, Homo sapiens
  chr19:22018891-22018909
  hyper
  upper_gi vs. bladder_and_urothelial,prostate,melanoma, breast,multiple_myeloma,renal,uterine
cgcaggtcacagagccac

SEQ ID NO: 480563 - DNA, 61 bp, Homo sapiens; identical to SEQ ID NO: 453000
  chr19:22019028-22019089
  hyper
  upper_gi vs. bladder_and_urothelial,prostate,melanoma, breast,multiple_myeloma,renal,uterine

SEQ ID NO: 480564 - DNA, 102 bp, Homo sapiens; identical to SEQ ID NO: 336054
  chr19:23432614-23432716
  hyper
  upper_gi vs. colorectal

SEQ ID NO: 480565 - DNA, 130 bp, Homo sapiens; identical to SEQ ID NO: 453001
  chr19:23432833-23432963
  hyper
  upper_gi vs. colorectal

SEQ ID NO: 480566 - DNA, 121 bp, Homo sapiens; identical to SEQ ID NO: 453002
  chr19:23433023-23433144
  hyper
  upper_gi vs. colorectal

SEQ ID NO: 480567 - DNA, 118 bp, Homo sapiens; identical to SEQ ID NO: 347577
  chr19:23433296-23433414
  hyper
  upper_gi vs. colorectal

SEQ ID NO: 480568 - DNA, 106 bp, Homo sapiens; identical to SEQ ID NO: 453004
  chr19:23456510-23456616
  hyper
  upper_gi vs. colorectal

SEQ ID NO: 480569 - DNA, 216 bp, Homo sapiens; identical to SEQ ID NO: 347579
  chr19:23456881-23457097
  hyper
  upper_gi vs. colorectal

SEQ ID NO: 480570 - DNA, 702 bp, Homo sapiens; identical to SEQ ID NO: 453008
  chr19:24216103-24216805
  hyper
  upper_gi vs. colorectal,pancreas_gallbladder, liver_bileduct,bladder_and_urothelial

SEQ ID NO: 480571 - DNA, 13 bp, Homo sapiens
  chr19:30019101-30019114
  hyper
  upper_gi vs. ovary,myeloid_neoplasm
cggcaggtgtgca

SEQ ID NO: 480572 - DNA, 61 bp, Homo sapiens; identical to SEQ ID NO: 455841
  chr19:30718934-30718995
  hyper
  upper_gi vs. melanoma

SEQ ID NO: 480573 - DNA, 61 bp, Homo sapiens; identical to SEQ ID NO: 455841
  chr19:30718934-30718995
  hyper
  upper_gi vs. melanoma,sarcoma

SEQ ID NO: 480574 - DNA, 4 bp, Homo sapiens
  chr19:36909065-36909069
  hyper
  upper_gi vs. sarcoma,prostate,breast,myeloid_neoplasm, bladder_and_urothelial,renal,ovary,melanoma,lymphoid_neoplasm, multiple_myeloma,non_cancer,thyroid
cgcc

SEQ ID NO: 480575 - DNA, 105 bp, Homo sapiens; identical to SEQ ID NO: 347589
  chr19:37096594-37096699
  hyper
  upper_gi vs. uterine,breast,melanoma,myeloid_neoplasm

SEQ ID NO: 480576 - DNA, 12 bp, Homo sapiens
  chr19:37158182-37158194
  hyper
  upper_gi vs. liver_bileduct
gccaaggcgggc

SEQ ID NO: 480577 - DNA, 4 bp, Homo sapiens
  chr19:37288206-37288210
  hyper
  upper_gi vs. myeloid_neoplasm,sarcoma,thyroid,prostate, breast,non_cancer,ovary
cgtg

SEQ ID NO: 480578 - DNA, 3 bp, Homo sapiens
  chr19:37288807-37288810
  hyper
  upper_gi vs. myeloid_neoplasm,sarcoma,thyroid,prostate, breast,non_cancer,ovary
acc

SEQ ID NO: 480579 - DNA, 156 bp, Homo sapiens; identical to SEQ ID NO: 352290
  chr19:37329462-37329618
  hyper
  upper_gi vs. pancreas_gallbladder

SEQ ID NO: 480580 - DNA, 3 bp, Homo sapiens
  chr19:37341258-37341261
  hyper
  upper_gi vs. liver_bileduct,pancreas_gallbladder,breast, lung,melanoma,uterine
ggc

SEQ ID NO: 480581 - DNA, 142 bp, Homo sapiens; identical to SEQ ID NO: 347590
  chr19:37342189-37342331
  hyper
  upper_gi vs. melanoma,breast,lung,uterine,liver_bileduct, prostate,pancreas_gallbladder,bladder_and_urothelial, myeloid_neoplasm,sarcoma,thyroid,renal,non_cancer,ovary

SEQ ID NO: 480582 - DNA, 35 bp, Homo sapiens; identical to SEQ ID NO: 457739
  chr19:37406731-37406766
  hyper
  upper_gi vs. sarcoma

SEQ ID NO: 480583 - DNA, 170 bp, Homo sapiens; identical to SEQ ID NO: 361562
  chr19:37407590-37407760
  hyper
  upper_gi vs. bladder_and_urothelial,prostate,breast

SEQ ID NO: 480584 - DNA, 42 bp, Homo sapiens; identical to SEQ ID NO: 453018
  chr19:37463952-37463994
  hyper
  upper_gi vs. bladder_and_urothelial

SEQ ID NO: 480585 - DNA, 84 bp, Homo sapiens; identical to SEQ ID NO: 457744
  chr19:37957588-37957672
  hyper
  upper_gi vs. melanoma,breast,prostate,uterine,sarcoma, thyroid,myeloid_neoplasm,ovary,bladder_and_urothelial,renal, non_cancer,lung,multiple_myeloma,pancreas_gallbladder, liver_bileduct

SEQ ID NO: 480586 - DNA, 7 bp, Homo sapiens
  chr19:37959780-37959787
  hyper
  upper_gi vs. prostate,breast,sarcoma,uterine,thyroid, ovary,bladder_and_urothelial,melanoma,lung,pancreas_gallbladder, non_cancer,myeloid_neoplasm,renal,liver_bileduct, multiple_myeloma
cgctccc

SEQ ID NO: 480587 - DNA, 33 bp, Homo sapiens; identical to SEQ ID NO: 374761
  chr19:37998138-37998171
  hyper
  upper_gi vs. breast

SEQ ID NO: 480588 - DNA, 425 bp, Homo sapiens
  chr19:38145586-38146011
  hyper
  upper_gi vs. liver_bileduct,bladder_and_urothelial, pancreas_gallbladder,melanoma,colorectal,uterine,cervical, breast,lung,ovary,sarcoma
gaaacaaagcagcagcacgaactcacagggaaccggcttttagaagagcagcagcgattcgtttctccttctcaagcgccttctctggaaactggcagggctggggaagcaggcagagttcaggacaccccaggcttttcttgactcgattggaacccaccctccacgcttccctggccccaactaaccgccacctgcatgcacaaatggaaacgacagggcagagggtcagcagtcacccgcgtctgggttcgcagctccgggtacgctgtagttccgcacccggttgcccacgcccgggaccacccactgtgtcttttcggaactgtccagcgtgtcctcctagaccccagacacccaccccaaatctaggtcccagcgttttgcaggggaccttcatcctggggcgttcacctctgacttcc

SEQ ID NO: 480589 - DNA, 46 bp, Homo sapiens; identical to SEQ ID NO: 479361
  chr19:38145965-38146011
  hyper
  upper_gi vs. bladder_and_urothelial,uterine, liver_bileduct,breast,ovary,lung,sarcoma,colorectal,prostate, renal,pancreas_gallbladder

SEQ ID NO: 480590 - DNA, 38 bp, Homo sapiens; identical to SEQ ID NO: 453024
  chr19:38182720-38182758
  hyper
  upper_gi vs. sarcoma,breast,prostate

SEQ ID NO: 480591 - DNA, 68 bp, Homo sapiens; identical to SEQ ID NO: 473968
  chr19:39997621-39997689
  hyper
  upper_gi vs. cervical,head_and_neck

SEQ ID NO: 480592 - DNA, 3 bp, Homo sapiens
  chr19:45655296-45655299
  hyper
  upper_gi vs. cervical,anorectal
cgg

SEQ ID NO: 480593 - DNA, 118 bp, Homo sapiens; identical to SEQ ID NO: 454295
  chr19:45656461-45656579
  hyper
  upper_gi vs. cervical

SEQ ID NO: 480594 - DNA, 57 bp, Homo sapiens; identical to SEQ ID NO: 453034
  chr19:46929939-46929996
  hyper
  upper_gi vs. ovary,multiple_myeloma

SEQ ID NO: 480595 - DNA, 333 bp, Homo sapiens; identical to SEQ ID NO: 361674
  chr19:50316721-50317054
  hyper
  upper_gi vs. pancreas_gallbladder

SEQ ID NO: 480596 - DNA, 219 bp, Homo sapiens; identical to SEQ ID NO: 453035
  chr19:50553779-50553998
  hyper
  upper_gi vs. colorectal

SEQ ID NO: 480597 - DNA, 5 bp, Homo sapiens
  chr19:50815289-50815294
  hyper
  upper_gi vs. cervical
cggca

SEQ ID NO: 480598 - DNA, 77 bp, Homo sapiens; identical to SEQ ID NO: 459537
  chr19:50816051-50816128
  hyper
  upper_gi vs. cervical

SEQ ID NO: 480599 - DNA, 2 bp, Homo sapiens
  chr19:51142491-51142493
  hyper
  upper_gi vs. liver_bileduct
cg

SEQ ID NO: 480600 - DNA, 96 bp, Homo sapiens; identical to SEQ ID NO: 361688
  chr19:51143111-51143207
  hyper
  upper_gi vs. liver_bileduct

SEQ ID NO: 480601 - DNA, 71 bp, Homo sapiens; identical to SEQ ID NO: 457763
  chr19:51161615-51161686
  hyper
  upper_gi vs. melanoma

SEQ ID NO: 480602 - DNA, 73 bp, Homo sapiens; identical to SEQ ID NO: 345605
  chr19:51228809-51228882
  hyper
  upper_gi vs. melanoma,cervical,uterine,prostate,ovary, thyroid,colorectal,head_and_neck,breast,non_cancer, myeloid_neoplasm

SEQ ID NO: 480603 - DNA, 204 bp, Homo sapiens; identical to SEQ ID NO: 361700
  chr19:52074533-52074737
  hyper
  upper_gi vs. pancreas_gallbladder

SEQ ID NO: 480604 - DNA, 8 bp, Homo sapiens
  chr19:52839404-52839412
  hyper
  upper_gi vs. bladder_and_urothelial
cggaaaac

SEQ ID NO: 480605 - DNA, 57 bp, Homo sapiens; identical to SEQ ID NO: 462663
  chr19:53193139-53193196
  hyper
  upper_gi vs. pancreas_gallbladder,melanoma,breast, bladder_and_urothelial,lung,renal

SEQ ID NO: 480606 - DNA, 140 bp, Homo sapiens; identical to SEQ ID NO: 453051
  chr19:53606073-53606213
  hyper
  upper_gi vs. colorectal

SEQ ID NO: 480607 - DNA, 222 bp, Homo sapiens; identical to SEQ ID NO: 453052
  chr19:53606354-53606576
  hyper
  upper_gi vs. colorectal

SEQ ID NO: 480608 - DNA, 289 bp, Homo sapiens; identical to SEQ ID NO: 453053
  chr19:53606605-53606894
  hyper
  upper_gi vs. colorectal

SEQ ID NO: 480609 - DNA, 176 bp, Homo sapiens; identical to SEQ ID NO: 453054
  chr19:53606400-53606576
  hyper
  upper_gi vs. colorectal

SEQ ID NO: 480610 - DNA, 428 bp, Homo sapiens; identical to SEQ ID NO: 453055
  chr19:53606605-53607033
  hyper
  upper_gi vs. colorectal

SEQ ID NO: 480611 - DNA, 111 bp, Homo sapiens; identical to SEQ ID NO: 347634
  chr19:53607111-53607222
  hyper
  upper_gi vs. colorectal

SEQ ID NO: 480612 - DNA, 1 bp, Homo sapiens
  chr19:53661430-53661431
  hyper
  upper_gi vs. bladder_and_urothelial
c

SEQ ID NO: 480613 - DNA, 6 bp, Homo sapiens
  chr19:53661882-53661888
  hyper
  upper_gi vs. bladder_and_urothelial
gctcac

SEQ ID NO: 480614 - DNA, 84 bp, Homo sapiens; identical to SEQ ID NO: 457782
  chr19:53696029-53696113
  hyper
  upper_gi vs. pancreas_gallbladder

SEQ ID NO: 480615 - DNA, 3 bp, Homo sapiens
  chr19:53970454-53970457
  hyper
  upper_gi vs. pancreas_gallbladder,breast
cgc

SEQ ID NO: 480616 - DNA, 114 bp, Homo sapiens
  chr19:53970643-53970757
  hyper
  upper_gi vs. pancreas_gallbladder,breast
atggagaatagaaagggggaggatttctattttgttttgtgggccgtcagcatgaaatcgtaccttccgcccaggcagggctttgcatttcacattctagtttgcatccccgtt

SEQ ID NO: 480617 - DNA, 1 bp, Homo sapiens
  chr19:53971573-53971574
  hyper
  upper_gi vs. pancreas_gallbladder,bladder_and_urothelial, breast
c

SEQ ID NO: 480618 - DNA, 4 bp, Homo sapiens
  chr19:54023868-54023872
  hyper
  upper_gi vs. bladder_and_urothelial,melanoma,breast, sarcoma
cgac

SEQ ID NO: 480619 - DNA, 1 bp, Homo sapiens
  chr19:54024558-54024559
  hyper
  upper_gi vs. bladder_and_urothelial,melanoma,breast, sarcoma
c

SEQ ID NO: 480620 - DNA, 17 bp, Homo sapiens
  chr19:56159257-56159274
  hyper
  upper_gi vs. cervical,lymphoid_neoplasm
cgccacccaatccgggg

SEQ ID NO: 480621 - DNA, 246 bp, Homo sapiens
  chr19:56159669-56159915
  hyper
  upper_gi vs. cervical,lymphoid_neoplasm
cctcggaccccgggcacccgcgggcgggggatggtggccgcgtttgcacccccgccctagtgcatgttcccgctggaatcgttccacgaccgctccccctcccacccgcgggacaaagggcgggggcggggggggcgcacccccacgcgtgacctttccccgtactgcgcacgcgcccagcccccaccaccgggggacggtccgcccgcccacgcgagtgcgggggaggggtgtgggggccccgaa

SEQ ID NO: 480622 - DNA, 68 bp, Homo sapiens; identical to SEQ ID NO: 352417
  chr19:56159950-56160018
  hyper
  upper_gi vs. cervical,lymphoid_neoplasm

SEQ ID NO: 480623 - DNA, 1 bp, Homo sapiens
  chr19:56879394-56879395
  hyper
  upper_gi vs. prostate
c

SEQ ID NO: 480624 - DNA, 18 bp, Homo sapiens
  chr19:56915935-56915953
  hyper
  upper_gi vs. uterine,prostate,myeloid_neoplasm,thyroid, non_cancer,breast
gtttgacagtgtggaatc

SEQ ID NO: 480625 - DNA, 47 bp, Homo sapiens; identical to SEQ ID NO: 457797
  chr19:57079253-57079300
  hyper
  upper_gi vs. sarcoma

SEQ ID NO: 480626 - DNA, 77 bp, Homo sapiens; identical to SEQ ID NO: 361753
  chr19:57106909-57106986
  hyper
  upper_gi vs. colorectal,breast,uterine,ovary

SEQ ID NO: 480627 - DNA, 31 bp, Homo sapiens; identical to SEQ ID NO: 453076
  chr19:58125385-58125416
  hyper
  upper_gi vs. pancreas_gallbladder

SEQ ID NO: 480628 - DNA, 29 bp, Homo sapiens
  chr19:58239193-58239222
  hyper
  upper_gi vs. melanoma,myeloid_neoplasm,lymphoid_neoplasm, thyroid,non_cancer,multiple_myeloma,prostate,sarcoma,renal
ccgagtttcaaagggctgacaggacttcc

SEQ ID NO: 480629 - DNA, 169 bp, Homo sapiens
  chr19:58665973-58666142
  hyper
  upper_gi vs. melanoma
cgacacactcataagcagccccttcctcgtcctttttttccttctgagctcgggaacgtctgctgggggtgagggggactcgcagaccacccccccccccgccccaggcggaggtcgggggccgtcacctggccaggtgtccggggaacggctcgggcggctgacaccg

SEQ ID NO: 480630 - DNA, 227 bp, Homo sapiens
  chr19:58666733-58666960
  hyper
  upper_gi vs. melanoma
tgggcagcggacagccaaaatcctgaaaccccgcggtgctccctgtgattcactttccagaggcccctcagtgccccgacgctggcccggagggcggtcgctgactgtcttgagactgaagctcactttcggatcctgggcgttcttgccaggttttttttattaatacagagaaaaccagtggctttgtgacagttagttttgaaactccctgaggagggccgagc

SEQ ID NO: 480631 - DNA, 344 bp, Homo sapiens; identical to SEQ ID NO: 457823
  chr19:58694209-58694553
  hyper
  upper_gi vs. pancreas_gallbladder,anorectal,prostate

SEQ ID NO: 480632 - DNA, 52 bp, Homo sapiens; identical to SEQ ID NO: 457824
  chr19:58694501-58694553
  hyper
  upper_gi vs. pancreas_gallbladder,anorectal,prostate

SEQ ID NO: 480633 - DNA, 4 bp, Homo sapiens
  chr2:10151899-10151903
  hyper
  upper_gi vs. liver_bileduct
cgta

SEQ ID NO: 480634 - DNA, 2 bp, Homo sapiens
  chr2:10152022-10152024
  hyper
  upper_gi vs. liver_bileduct
gc

SEQ ID NO: 480635 - DNA, 17 bp, Homo sapiens
  chr2:19550023-19550040
  hyper
  upper_gi vs. pancreas_gallbladder
cgcccctccagggctgg

SEQ ID NO: 480636 - DNA, 138 bp, Homo sapiens; identical to SEQ ID NO: 453089
  chr2:19550409-19550547
  hyper
  upper_gi vs. pancreas_gallbladder

SEQ ID NO: 480637 - DNA, 274 bp, Homo sapiens; identical to SEQ ID NO: 346421
  chr2:19550611-19550885
  hyper
  upper_gi vs. pancreas_gallbladder

SEQ ID NO: 480638 - DNA, 389 bp, Homo sapiens
  chr2:20866721-20867110
  hyper
  upper_gi vs. pancreas_gallbladder,liver_bileduct, bladder_and_urothelial
cgcttggcgagggtgggggcgtagcgctgcggtgggaggaggcggctccggccctggtctccactctaggccggggtggggggcgcatagcggccgccggagctttcagcagggggcgctgctccgggcgttgggcgggggtggggtgggccaggagggggggccgcgggctggccgcgcacacttcccccattattaaacactatgttcaaaaggcgccgggggacttcccggagccacggagcccgcgccgcccgcccgcccggcccacggagcccatggacctgagcgccgccgccgcgctgtgcctttggctgctgagcgcctgccgcccccgcgacgggctggaagcggccgccgtgctgcgagcggcgggggctgggccggtc

SEQ ID NO: 480639 - DNA, 155 bp, Homo sapiens; identical to SEQ ID NO: 349468
  chr2:20867313-20867468
  hyper
  upper_gi vs. pancreas_gallbladder,liver_bileduct, bladder_and_urothelial

SEQ ID NO: 480640 - DNA, 5 bp, Homo sapiens
  chr2:25391009-25391014
  hyper
  upper_gi vs. uterine,ovary
cgaaa

SEQ ID NO: 480641 - DNA, 22 bp, Homo sapiens
  chr2:25391734-25391756
  hyper
  upper_gi vs. uterine,ovary
gcacccccgtgtggggcaggcc

SEQ ID NO: 480642 - DNA, 17 bp, Homo sapiens
  chr2:27484883-27484900
  hyper
  upper_gi vs. anorectal,uterine,cervical
cggacggtcagccgaca

SEQ ID NO: 480643 - DNA, 22 bp, Homo sapiens
  chr2:29337909-29337931
  hyper
  upper_gi vs. cervical,pancreas_gallbladder
cgtgggtgtagcacggattagg

SEQ ID NO: 480644 - DNA, 69 bp, Homo sapiens; identical to SEQ ID NO: 459569
  chr2:31361021-31361090
  hyper
  upper_gi vs. head_and_neck,renal,breast, pancreas_gallbladder,lung,cervical,ovary,prostate,thyroid, non_cancer,bladder_and_urothelial,lymphoid_neoplasm,sarcoma, uterine,myeloid_neoplasm

SEQ ID NO: 480645 - DNA, 179 bp, Homo sapiens; identical to SEQ ID NO: 459570
  chr2:31361118-31361297
  hyper
  upper_gi vs. head_and_neck,renal,breast, pancreas_gallbladder,lung,cervical,ovary,prostate,thyroid, non_cancer,bladder_and_urothelial,lymphoid_neoplasm,sarcoma, uterine,myeloid_neoplasm

SEQ ID NO: 480646 - DNA, 69 bp, Homo sapiens; identical to SEQ ID NO: 459569
  chr2:31361021-31361090
  hyper
  upper_gi vs. pancreas_gallbladder,head_and_neck,breast, ovary,uterine,renal,lung,cervical,lymphoid_neoplasm, multiple_myeloma,bladder_and_urothelial

SEQ ID NO: 480647 - DNA, 179 bp, Homo sapiens; identical to SEQ ID NO: 459570
  chr2:31361118-31361297
  hyper
  upper_gi vs. pancreas_gallbladder,head_and_neck,breast, ovary,uterine,renal,lung,cervical,lymphoid_neoplasm, multiple_myeloma,bladder_and_urothelial

SEQ ID NO: 480648 - DNA, 70 bp, Homo sapiens; identical to SEQ ID NO: 346429
  chr2:31361690-31361760
  hyper
  upper_gi vs. pancreas_gallbladder,head_and_neck,breast, ovary,uterine,renal,lung,cervical,lymphoid_neoplasm, multiple_myeloma,bladder_and_urothelial

SEQ ID NO: 480649 - DNA, 105 bp, Homo sapiens; identical to SEQ ID NO: 198157
  chr2:31457427-31457532
  hyper
  upper_gi vs. bladder_and_urothelial,head_and_neck,breast, anorectal,pancreas_gallbladder,ovary,lung,prostate,sarcoma, cervical,multiple_myeloma,renal,uterine,non_cancer

SEQ ID NO: 480650 - DNA, 77 bp, Homo sapiens; identical to SEQ ID NO: 454316
  chr2:42720186-42720263
  hyper
  upper_gi vs. cervical

SEQ ID NO: 480651 - DNA, 54 bp, Homo sapiens
  chr2:56410764-56410818
  hyper
  upper_gi vs. head_and_neck
cgatccctccaaatacgaagcacctcgcatttgggtcagcagctgtttcccctg

SEQ ID NO: 480652 - DNA, 5 bp, Homo sapiens
  chr2:56410996-56411001
  hyper
  upper_gi vs. head_and_neck
ggagc

SEQ ID NO: 480653 - DNA, 277 bp, Homo sapiens
  chr2:56411253-56411530
  hyper
  upper_gi vs. head_and_neck
ggaggcgccgcggtgcccggcgcgccctccaagctaggagaggggagaagccgggggctgcagctgggcaagggggaggaaagtgcgtgtgcgtgcacgcctgtgtgcagggcagagagtgcggggggcgacagtctcggcttagggcggaggagagggcaggggaacggcggtgcagctcccccgctgtccccgaggatttcccgcggcagccccgggctccccagtgcccctcaccatggacttgcgcggagttgggacgggcctcggcagcagc

SEQ ID NO: 480654 - DNA, 54 bp, Homo sapiens; identical to SEQ ID NO: 346439
  chr2:63287368-63287422
  hyper
  upper_gi vs. cervical

SEQ ID NO: 480655 - DNA, 77 bp, Homo sapiens; identical to SEQ ID NO: 459577
  chr2:66652787-66652864
  hyper
  upper_gi vs. pancreas_gallbladder

SEQ ID NO: 480656 - DNA, 60 bp, Homo sapiens; identical to SEQ ID NO: 459578
  chr2:66652963-66653023
  hyper
  upper_gi vs. pancreas_gallbladder

SEQ ID NO: 480657 - DNA, 79 bp, Homo sapiens; identical to SEQ ID NO: 346440
  chr2:68547270-68547349
  hyper
  upper_gi vs. melanoma,head_and_neck,renal,sarcoma, myeloid_neoplasm

SEQ ID NO: 480658 - DNA, 443 bp, Homo sapiens; identical to SEQ ID NO: 474000
  chr2:71453505-71453948
  hyper
  upper_gi vs. colorectal,bladder_and_urothelial,cervical, anorectal,renal,melanoma,head_and_neck

SEQ ID NO: 480659 - DNA, 128 bp, Homo sapiens; identical to SEQ ID NO: 471154
  chr2:71453820-71453948
  hyper
  upper_gi vs. colorectal,bladder_and_urothelial,lung, cervical,anorectal,renal,head_and_neck

SEQ ID NO: 480660 - DNA, 228 bp, Homo sapiens; identical to SEQ ID NO: 349516
  chr2:71454386-71454614
  hyper
  upper_gi vs. colorectal,bladder_and_urothelial,lung, cervical,anorectal,renal,head_and_neck

SEQ ID NO: 480661 - DNA, 163 bp, Homo sapiens; identical to SEQ ID NO: 349538
  chr2:87018396-87018559
  hyper
  upper_gi vs. myeloid_neoplasm,ovary

SEQ ID NO: 480662 - DNA, 144 bp, Homo sapiens; identical to SEQ ID NO: 349540
  chr2:88752878-88753022
  hyper
  upper_gi vs. uterine

SEQ ID NO: 480663 - DNA, 147 bp, Homo sapiens; identical to SEQ ID NO: 457849
  chr2:101033445-101033592
  hyper
  upper_gi vs. melanoma,lymphoid_neoplasm,anorectal, prostate,breast,lung,sarcoma,multiple_myeloma,renal,uterine, ovary,non_cancer,myeloid_neoplasm

SEQ ID NO: 480664 - DNA, 144 bp, Homo sapiens; identical to SEQ ID NO: 345031
  chr2:105471069-105471213
  hyper
  upper_gi vs. melanoma

SEQ ID NO: 480665 - DNA, 455 bp, Homo sapiens; identical to SEQ ID NO: 474007
  chr2:105760109-105760564
  hyper
  upper_gi vs. bladder_and_urothelial

SEQ ID NO: 480666 - DNA, 164 bp, Homo sapiens
  chr2:109744585-109744749
  hyper
  upper_gi vs. pancreas_gallbladder
cgacgggaacgcaaagcggccacgagggggcagcgcacggcagggaatcttcgccgccgaccccagcccaccgccaaacttccctgctgctctcggtcctcctgtacgtacttccgttgctctgacgctcccagaagccggggcgtcgggaaggagagcgcgaa

SEQ ID NO: 480667 - DNA, 31 bp, Homo sapiens; identical to SEQ ID NO: 453113
  chr2:118981062-118981093
  hyper
  upper_gi vs. colorectal,multiple_myeloma,non_cancer, thyroid,myeloid_neoplasm

SEQ ID NO: 480668 - DNA, 225 bp, Homo sapiens; identical to SEQ ID NO: 459586
  chr2:120281422-120281647
  hyper
  upper_gi vs. pancreas_gallbladder

SEQ ID NO: 480669 - DNA, 6 bp, Homo sapiens
  chr2:127535179-127535185
  hyper
  upper_gi vs. melanoma,liver_bileduct,breast, bladder_and_urothelial,colorectal
aagggc

SEQ ID NO: 480670 - DNA, 49 bp, Homo sapiens; identical to SEQ ID NO: 453114
  chr2:127782995-127783044
  hyper
  upper_gi vs. renal

SEQ ID NO: 480671 - DNA, 35 bp, Homo sapiens; identical to SEQ ID NO: 349594
  chr2:145275891-145275926
  hyper
  upper_gi vs. lymphoid_neoplasm,renal,melanoma, bladder_and_urothelial,head_and_neck,cervical,lung, multiple_myeloma,uterine,ovary

SEQ ID NO: 480672 - DNA, 1 bp, Homo sapiens
  chr2:145282267-145282268
  hyper
  upper_gi vs. melanoma,lymphoid_neoplasm
c

SEQ ID NO: 480673 - DNA, 51 bp, Homo sapiens; identical to SEQ ID NO: 453124
  chr2:149632592-149632643
  hyper
  upper_gi vs. ovary,prostate,sarcoma,thyroid,breast, non_cancer,bladder_and_urothelial,uterine,melanoma

SEQ ID NO: 480674 - DNA, 238 bp, Homo sapiens; identical to SEQ ID NO: 345045
  chr2:149634146-149634384
  hyper
  upper_gi vs. prostate,sarcoma,breast, bladder_and_urothelial

SEQ ID NO: 480675 - DNA, 109 bp, Homo sapiens; identical to SEQ ID NO: 357334
  chr2:154335663-154335772
  hyper
  upper_gi vs. breast,lung

SEQ ID NO: 480676 - DNA, 101 bp, Homo sapiens; identical to SEQ ID NO: 453132
  chr2:168148871-168148972
  hyper
  upper_gi vs. pancreas_gallbladder

SEQ ID NO: 480677 - DNA, 240 bp, Homo sapiens; identical to SEQ ID NO: 453133
  chr2:168149264-168149504
  hyper
  upper_gi vs. pancreas_gallbladder

SEQ ID NO: 480678 - DNA, 152 bp, Homo sapiens; identical to SEQ ID NO: 453134
  chr2:168149556-168149708
  hyper
  upper_gi vs. pancreas_gallbladder

SEQ ID NO: 480679 - DNA, 240 bp, Homo sapiens; identical to SEQ ID NO: 453133
  chr2:168149264-168149504
  hyper
  upper_gi vs. colorectal

SEQ ID NO: 480680 - DNA, 221 bp, Homo sapiens; identical to SEQ ID NO: 453136
  chr2:168149556-168149777
  hyper
  upper_gi vs. colorectal

SEQ ID NO: 480681 - DNA, 64 bp, Homo sapiens; identical to SEQ ID NO: 454336
  chr2:168149713-168149777
  hyper
  upper_gi vs. colorectal

SEQ ID NO: 480682 - DNA, 42 bp, Homo sapiens; identical to SEQ ID NO: 454338
  chr2:175190730-175190772
  hyper
  upper_gi vs. cervical,anorectal

SEQ ID NO: 480683 - DNA, 76 bp, Homo sapiens; identical to SEQ ID NO: 459596
  chr2:175546713-175546789
  hyper
  upper_gi vs. ovary,pancreas_gallbladder,head_and_neck, sarcoma,uterine,lung,prostate,non_cancer,renal,multiple_myeloma, thyroid,cervical,lymphoid_neoplasm,bladder_and_urothelial, melanoma,myeloid_neoplasm

SEQ ID NO: 480684 - DNA, 61 bp, Homo sapiens; identical to SEQ ID NO: 349639
  chr2:176995668-176995729
  hyper
  upper_gi vs. colorectal

SEQ ID NO: 480685 - DNA, 22 bp, Homo sapiens
  chr2:177001081-177001103
  hyper
  upper_gi vs. colorectal
cgggggagagagaaagcagaag

SEQ ID NO: 480686 - DNA, 40 bp, Homo sapiens; identical to SEQ ID NO: 346500
  chr2:177005679-177005719
  hyper
  upper_gi vs. bladder_and_urothelial,colorectal,anorectal, renal

SEQ ID NO: 480687 - DNA, 41 bp, Homo sapiens; identical to SEQ ID NO: 462744
  chr2:177042492-177042533
  hyper
  upper_gi vs. anorectal,cervical

SEQ ID NO: 480688 - DNA, 220 bp, Homo sapiens; identical to SEQ ID NO: 466996
  chr2:177052744-177052964
  hyper
  upper_gi vs. colorectal

SEQ ID NO: 480689 - DNA, 56 bp, Homo sapiens
  chr2:177502170-177502226
  hyper
  upper_gi vs. colorectal,cervical,melanoma,renal
cgcacccctctttacaaacctgagcggggctttcggggtaaggggaggcaagactt

SEQ ID NO: 480690 - DNA, 61 bp, Homo sapiens
  chr2:177502920-177502981
  hyper
  upper_gi vs. colorectal,cervical,melanoma,renal
aaaaaaaaaaaaaaaaaaaaaaaaccctaactgtaaatattatttggaggtgggcgagggc

SEQ ID NO: 480691 - DNA, 30 bp, Homo sapiens
  chr2:177503135-177503165
  hyper
  upper_gi vs. colorectal,cervical,melanoma,renal
gtgtgagactccagtaaccccggagctctc

SEQ ID NO: 480692 - DNA, 5 bp, Homo sapiens
  chr2:182321353-182321358
  hyper
  upper_gi vs. multiple_myeloma,myeloid_neoplasm, non_cancer,sarcoma,lymphoid_neoplasm,uterine,ovary,thyroid, prostate,renal
cgtgg

SEQ ID NO: 480693 - DNA, 34 bp, Homo sapiens; identical to SEQ ID NO: 345053
  chr2:182323095-182323129
  hyper
  upper_gi vs. thyroid,non_cancer,lymphoid_neoplasm, myeloid_neoplasm,multiple_myeloma

SEQ ID NO: 480694 - DNA, 17 bp, Homo sapiens
  chr2:193058995-193059012
  hyper
  upper_gi vs. ovary
cgcgctagggtaggctg

SEQ ID NO: 480695 - DNA, 13 bp, Homo sapiens
  chr2:197458535-197458548
  hyper
  upper_gi vs. lung,head_and_neck,anorectal,breast,ovary, pancreas_gallbladder,bladder_and_urothelial
accctctgaggtc

SEQ ID NO: 480696 - DNA, 518 bp, Homo sapiens; identical to SEQ ID NO: 349662
  chr2:198174828-198175346
  hyper
  upper_gi vs. pancreas_gallbladder

SEQ ID NO: 480697 - DNA, 11 bp, Homo sapiens
  chr2:207139040-207139051
  hyper
  upper_gi vs. melanoma
cggaaacgact

SEQ ID NO: 480698 - DNA, 58 bp, Homo sapiens; identical to SEQ ID NO: 469005
  chr2:207307406-207307464
  hyper
  upper_gi vs. sarcoma,myeloid_neoplasm

SEQ ID NO: 480699 - DNA, 240 bp, Homo sapiens; identical to SEQ ID NO: 474043
  chr2:207308960-207309200
  hyper
  upper_gi vs. anorectal,uterine,head_and_neck,melanoma, prostate,bladder_and_urothelial,myeloid_neoplasm,cervical, sarcoma,thyroid,non_cancer

SEQ ID NO: 480700 - DNA, 5 bp, Homo sapiens
  chr2:208029816-208029821
  hyper
  upper_gi vs. pancreas_gallbladder,liver_bileduct
cgtgg

SEQ ID NO: 480701 - DNA, 890 bp, Homo sapiens
  chr2:208030665-208031555
  hyper
  upper_gi vs. pancreas_gallbladder,liver_bileduct
cgctgttcgctcctaatgcaatctttgctctttattttgggaggttgcatttttttctctcgcgatcgcttctcttccccccccttcccttccctccccaccccccaccccatccttgctagtttgtagtcttccccctcccttttctcctcctcctgctcttccccctccccaaactccctccctccgttcggttctccgcgcagccgtgggatctcgaggagggcgtccattaggccgcgtgtgaccatgtaaggtaaacagggggctcatgaagtcactgaggaccaatggggagcccggagcagagcctggggcggggcttggccctggcggcgggcgcggattggcacgctgcggatctccctgctgccttacaaggcggtgcgaggcgagctatttttagagggctatataagggggctgaggcggccgcccggcggccgggcagcgcgagcgcaagggacagggagggtcgtggcgacactcgcgccagctcccgggacggctgggctcgggctggtcgccgacctccgaccctccactagatgcctggcagagcccggcgcgtccggagcccgcgcccctcagagggaaggggtcgcgcgtcgccgcggcggccctgaggctgacggtcgggaggtgaaaggccggagtgcggggtcaggacgcctcctggagggggcgcggcgcagggggccgcggggaagccgccgagggcgcggagcgggaaggaaggacagtggccaccccgcctccgcctgggcacggggcagggacccgcgcgaggcggtgccggggaggtcctcacgtactcaaaaacaagcagaaaaggcatccagggccccttcccgaactccccacgggctgccagggtgcagagaagaagc

SEQ ID NO: 480702 - DNA, 740 bp, Homo sapiens; identical to SEQ ID NO: 457897
  chr2:208031094-208031834
  hyper
  upper_gi vs. pancreas_gallbladder

SEQ ID NO: 480703 - DNA, 56 bp, Homo sapiens; identical to SEQ ID NO: 349670
  chr2:208031939-208031995
  hyper
  upper_gi vs. pancreas_gallbladder

SEQ ID NO: 480704 - DNA, 5 bp, Homo sapiens
  chr2:225906006-225906011
  hyper
  upper_gi vs. lymphoid_neoplasm,cervical,prostate, non_cancer,myeloid_neoplasm,thyroid,sarcoma,multiple_myeloma, breast,melanoma,renal,lung,ovary
cggat

SEQ ID NO: 480705 - DNA, 237 bp, Homo sapiens; identical to SEQ ID NO: 459601
  chr2:225906168-225906405
  hyper
  upper_gi vs. lymphoid_neoplasm,cervical,prostate, non_cancer,myeloid_neoplasm,thyroid,sarcoma,multiple_myeloma, breast,melanoma,renal,lung,ovary

SEQ ID NO: 480706 - DNA, 77 bp, Homo sapiens; identical to SEQ ID NO: 454345
  chr2:225906328-225906405
  hyper
  upper_gi vs. lymphoid_neoplasm,non_cancer,cervical, myeloid_neoplasm,prostate,thyroid,breast,melanoma,renal, multiple_myeloma,sarcoma,ovary,lung,uterine,anorectal

SEQ ID NO: 480707 - DNA, 353 bp, Homo sapiens
  chr2:230932495-230932848
  hyper
  upper_gi vs. head_and_neck,colorectal
cgaaatggccgtccccggtctctcaccccatttcagcctctcttgaggagcctcaatcggaagcgctaagggggcccagcctctgcgcgccctgggtgcgggatcgtgcccgcggggtccggcctcgcgccccacccttcgagcgcccgcccccacccgcgctcggtgctcccgctcccttggcaccccgagaccacatccccacttcgggcaccccgcatccctcggcgcgttcggaagccagcagcccaccggggaagctgggccggctgcagcaccacagcctgtgcagagaggcatccgcaccccgcgaagtccctaggcgcagccccgggtcccccgctctgcgcctc

SEQ ID NO: 480708 - DNA, 147 bp, Homo sapiens
  chr2:230933064-230933211
  hyper
  upper_gi vs. head_and_neck,colorectal
cccgcggcggccttggcactaccacctgccccggcacagtctcgccctccaccgcccgggcagcctttcccgagcctgccttgggctggggctgccccttcccgggggtccctgggggtgcagcggccatctgaaacctaggctccg

SEQ ID NO: 480709 - DNA, 3 bp, Homo sapiens
  chr2:230933223-230933226
  hyper
  upper_gi vs. head_and_neck,colorectal
tcg

SEQ ID NO: 480710 - DNA, 4 bp, Homo sapiens
  chr2:230933272-230933276
  hyper
  upper_gi vs. head_and_neck,colorectal
cccg

SEQ ID NO: 480711 - DNA, 20 bp, Homo sapiens
  chr2:230933303-230933323
  hyper
  upper_gi vs. head_and_neck,colorectal
gctccacgcccggatcctcg

SEQ ID NO: 480712 - DNA, 218 bp, Homo sapiens; identical to SEQ ID NO: 469029
  chr2:232790830-232791048
  hyper
  upper_gi vs. head_and_neck

SEQ ID NO: 480713 - DNA, 391 bp, Homo sapiens; identical to SEQ ID NO: 469030
  chr2:232791140-232791531
  hyper
  upper_gi vs. head_and_neck

SEQ ID NO: 480714 - DNA, 213 bp, Homo sapiens; identical to SEQ ID NO: 459608
  chr2:232791318-232791531
  hyper
  upper_gi vs. anorectal

SEQ ID NO: 480715 - DNA, 158 bp, Homo sapiens
  chr20:1874963-1875121
  hyper
  upper_gi vs. liver_bileduct,pancreas_gallbladder
cggggagcagccgcgcggccggagtccggaggcgaggggaggtcggccgcaacttccccggtccaccttaagaggacgatgtagccagctcgcagcgctgaccttagaaaaacaagtttgcgcaaagtggagcggggacccggcctctgggcagcccc

SEQ ID NO: 480716 - DNA, 666 bp, Homo sapiens; identical to SEQ ID NO: 361788
  chr20:1875155-1875821
  hyper
  upper_gi vs. liver_bileduct,pancreas_gallbladder

SEQ ID NO: 480717 - DNA, 776 bp, Homo sapiens
  chr20:1875335-1876111
  hyper
  upper_gi vs. pancreas_gallbladder
cgggcgccggcgcgggggaggacgctgccctccccggccgggcgcgcagctcgcagccctcgctccctcccccggggcgcgcaggcgggcgctcgctcgcagagaaggtgccggcggggccggagccccgaagcctccccgggcggcgggaagacgggaggaggggaaagggaaggagggagggggtcgggctgccgggagggcgggggcagcggccgggactgcgggccgggagcgagcccagccgcccgcgccgtgtggagcccgggcggggcaggtgggcagcggcgggggcggctccgcgcggccgggctcggccgtgctgcccctcgcccctgctcgcgcggtcctctctcccgcgcggtctgtcggtctgcgcgccgcctcgctcctcgctcctcgctctccccctctttctccccctctcgcctctccgtgtctctggctctctgcctggctcccttgggtctgtttctctctcctgccgcctctctctggccgcccctggctttatttctcgcgcgcttggggtctctcccagtctccgtctctccatttctcctggggggcggggagggggggtctccaaaaaccgcggcggcggcggcggccgctccaggcgcccgttccggagtcggggggaggcccagccgggaggggggaagggggggagccttagtcatttccccgctccagcctgctcccgcccgagcgcgcactcacggccgctctccctcctcgctccgcagccgcggcccatggagcccgccggcccg

SEQ ID NO: 480718 - DNA, 20 bp, Homo sapiens
  chr20:1876176-1876196
  hyper
  upper_gi vs. pancreas_gallbladder
gcacccccccgctccccacc

SEQ ID NO: 480719 - DNA, 414 bp, Homo sapiens; identical to SEQ ID NO: 347652
  chr20:4804008-4804422
  hyper
  upper_gi vs. lymphoid_neoplasm,bladder_and_urothelial, melanoma,multiple_myeloma,non_cancer,ovary,uterine,thyroid, sarcoma

SEQ ID NO: 480720 - DNA, 185 bp, Homo sapiens; identical to SEQ ID NO: 457915
  chr20:21086682-21086867
  hyper

SEQ ID NO: 480721 - DNA, 107 bp, Homo sapiens; identical to SEQ ID NO: 361836
  chr20:21087188-21087295
  hyper

SEQ ID NO: 480722 - DNA, 139 bp, Homo sapiens; identical to SEQ ID NO: 453169
  chr20:30639494-30639633
  hyper
  upper_gi vs. anorectal

SEQ ID NO: 480723 - DNA, 5 bp, Homo sapiens
  chr20:34188561-34188566
  hyper
  upper_gi vs. thyroid,anorectal,non_cancer
cgtcc

SEQ ID NO: 480724 - DNA, 60 bp, Homo sapiens; identical to SEQ ID NO: 454352
  chr20:34190072-34190132
  hyper
  upper_gi vs. anorectal,head_and_neck,cervical,sarcoma, prostate,non_cancer,myeloid_neoplasm

SEQ ID NO: 480725 - DNA, 1 bp, Homo sapiens
  chr20:34190145-34190146
  hyper
  upper_gi vs. anorectal,head_and_neck,cervical,sarcoma, prostate,non_cancer,myeloid_neoplasm
c

SEQ ID NO: 480726 - DNA, 25 bp, Homo sapiens
  chr20:36531527-36531552
  hyper
  upper_gi vs. pancreas_gallbladder
cgcagtcggaggcggccggctgggc

SEQ ID NO: 480727 - DNA, 24 bp, Homo sapiens
  chr20:36531991-36532015
  hyper
  upper_gi vs. pancreas_gallbladder
gccccctgccggcgcggtggaccc

SEQ ID NO: 480728 - DNA, 390 bp, Homo sapiens; identical to SEQ ID NO: 455936
  chr20:37433723-37434113
  hyper
  upper_gi vs. ovary,multiple_myeloma, bladder_and_urothelial,lymphoid_neoplasm,cervical,uterine

SEQ ID NO: 480729 - DNA, 27 bp, Homo sapiens
  chr20:37434086-37434113
  hyper
  upper_gi vs. ovary,bladder_and_urothelial, multiple_myeloma,uterine,lymphoid_neoplasm,myeloid_neoplasm, non_cancer,prostate,thyroid,cervical
cggggtgggggttaggaaaactatttt

SEQ ID NO: 480730 - DNA, 115 bp, Homo sapiens; identical to SEQ ID NO: 361877
  chr20:39318166-39318281
  hyper
  upper_gi vs. cervical

SEQ ID NO: 480731 - DNA, 218 bp, Homo sapiens
  chr20:39318166-39318384
  hyper
  upper_gi vs. colorectal,cervical
ccccacctctaggccaaatcaccgctttcccctcctcgcgcactctcctccctcagttccctttgcaccccacccccatcccgtgtcacccccaaggaggctcagaatgagcgccgggacaacgcctcctgggccctttgttcccaagcggcccccgcccagtgggcgacgctctgtgtgtcctcgcggcttctggccgtgtgtgtcgtgcgttcctg

SEQ ID NO: 480732 - DNA, 364 bp, Homo sapiens
  chr20:39318415-39318779
  hyper
  upper_gi vs. colorectal,cervical
gggagggcgggctcgaggctccgagagttgtgttcagacccaactcttaacctcaggggacctttctcaggccaagcgagggcccctcctggcgggtgcagtcgcagagccctgaggttcgactccactggccccgccgctccccgcgttcaccccaccgcacaatgttcacagtgaaggcgacgggaaaagcagcagcccaaaggctctgaattcctcttccccgccacacgcacggaatcctgagcccccggagcctcggggccgaggccggcccgggacggtgctccgagtagctctccactgctggggagccggccctgtttttgtttgaacgttttgtaacgattaagcagatcccggc

SEQ ID NO: 480733 - DNA, 136 bp, Homo sapiens; identical to SEQ ID NO: 459635
  chr20:55206463-55206599
  hyper
  upper_gi vs. cervical

SEQ ID NO: 480734 - DNA, 4 bp, Homo sapiens
  chr20:55206736-55206740
  hyper
  upper_gi vs. cervical
cgag

SEQ ID NO: 480735 - DNA, 95 bp, Homo sapiens; identical to SEQ ID NO: 352515
  chr20:55206774-55206869
  hyper
  upper_gi vs. cervical

SEQ ID NO: 480736 - DNA, 248 bp, Homo sapiens; identical to SEQ ID NO: 459641
  chr20:61810310-61810558
  hyper
  upper_gi vs. melanoma

SEQ ID NO: 480737 - DNA, 59 bp, Homo sapiens; identical to SEQ ID NO: 459650
  chr20:62694227-62694286
  hyper
  upper_gi vs. pancreas_gallbladder

SEQ ID NO: 480738 - DNA, 211 bp, Homo sapiens; identical to SEQ ID NO: 459651
  chr20:62694767-62694978
  hyper
  upper_gi vs. pancreas_gallbladder

SEQ ID NO: 480739 - DNA, 252 bp, Homo sapiens; identical to SEQ ID NO: 459652
  chr20:62694767-62695019
  hyper
  upper_gi vs. pancreas_gallbladder

SEQ ID NO: 480740 - DNA, 197 bp, Homo sapiens; identical to SEQ ID NO: 352536
  chr20:62695048-62695245
  hyper
  upper_gi vs. pancreas_gallbladder

SEQ ID NO: 480741 - DNA, 123 bp, Homo sapiens; identical to SEQ ID NO: 457941
  chr21:27011487-27011610
  hyper
  upper_gi vs. uterine,lymphoid_neoplasm,sarcoma, multiple_myeloma,breast,myeloid_neoplasm,non_cancer, head_and_neck,thyroid,ovary,prostate

SEQ ID NO: 480742 - DNA, 134 bp, Homo sapiens; identical to SEQ ID NO: 457942
  chr21:27011639-27011773
  hyper
  upper_gi vs. uterine,lymphoid_neoplasm,sarcoma, multiple_myeloma,breast,myeloid_neoplasm,non_cancer, head_and_neck,thyroid,ovary,prostate

SEQ ID NO: 480743 - DNA, 153 bp, Homo sapiens; identical to SEQ ID NO: 345649
  chr21:27012725-27012878
  hyper
  upper_gi vs. uterine,sarcoma,lymphoid_neoplasm, multiple_myeloma,non_cancer,myeloid_neoplasm,ovary,thyroid, breast,prostate,head_and_neck,melanoma

SEQ ID NO: 480744 - DNA, 181 bp, Homo sapiens
  chr21:33244741-33244922
  hyper
  upper_gi vs. pancreas_gallbladder,colorectal
cgaagagaggcgagcgccggtccacctcctgcaatcacaggcatcatttcaatggaaggcaaagaaggtgtaagctacaagcagaggcagcaaacgccctggttcctacattgctgctgctactattactgctgtggctgcgcctcctccaacacagccaaccaggctgcgtgcgagcccg

SEQ ID NO: 480745 - DNA, 291 bp, Homo sapiens
  chr21:33245047-33245338
  hyper
  upper_gi vs. pancreas_gallbladder,colorectal
ggagttcgagagccttcccccttccccccgccccgggtgggtgcggccagtgggggatttcaccgccgaaaggtccagaaaacccaagcccagaatccgggcaagaggcgcagccggaggcggcccgacctgggcggcccgggagcgcgcgcctccgaggccgcgcaggttctccctgtctggcgctcaggtggcttctccgtccactccgccgctcccctccccgggccctcccctctccagcgagggtcgagtttgactgtggcgcgcggggaaggaggggctactagg

SEQ ID NO: 480746 - DNA, 152 bp, Homo sapiens
  chr21:33245489-33245641
  hyper
  upper_gi vs. pancreas_gallbladder,colorectal
ggagcggccgcccagcgcacggctaggagcgatcgcgggagcccgacccaagcccgtgcgggccagacggcggcggcgaggcggaggctgcggaggcacccgggctcccggacccaggcacccggaccccgggacccaggcgccgccggacc

SEQ ID NO: 480747 - DNA, 194 bp, Homo sapiens
  chr21:33245144-33245338
  hyper
  upper_gi vs. pancreas_gallbladder,colorectal
cgggcaagaggcgcagccggaggcggcccgacctgggcggcccgggagcgcgcgcctccgaggccgcgcaggttctccctgtctggcgctcaggtggcttctccgtccactccgccgctcccctccccgggccctcccctctccagcgagggtcgagtttgactgtggcgcgcggggaaggaggggctactagg

SEQ ID NO: 480748 - DNA, 195 bp, Homo sapiens
  chr21:33245489-33245684
  hyper
  upper_gi vs. pancreas_gallbladder,colorectal
ggagcggccgcccagcgcacggctaggagcgatcgcgggagcccgacccaagcccgtgcgggccagacggcggcggcgaggcggaggctgcggaggcacccgggctcccggacccaggcacccggaccccgggacccaggcgccgccggaccgcgccccaccccgcgcgcccgagcagggcgactgtcattagct

SEQ ID NO: 480749 - DNA, 76 bp, Homo sapiens
  chr21:33245718-33245794
  hyper
  upper_gi vs. pancreas_gallbladder,colorectal
ctgaaaggggcccgggcgaccctaagaggaagaacttttgggggcggggtccccggtcccgcgtcccctgggcagc

SEQ ID NO: 480750 - DNA, 133 bp, Homo sapiens
  chr21:33245877-33246010
  hyper
  upper_gi vs. pancreas_gallbladder,colorectal
ggctgggcccagggcggcggcgggagaagccggggaagccgaagagcctggggaggaggagctgcgagcgcgggagacgagcaggagccgcgcgggccgcggcgagcgcgatgccggcggcggcgggggacgg

SEQ ID NO: 480751 - DNA, 42 bp, Homo sapiens
  chr21:33245642-33245684
  hyper
  upper_gi vs. pancreas_gallbladder,colorectal
cgccccaccccgcgcgcccgagcagggcgactgtcattagct

SEQ ID NO: 480752 - DNA, 76 bp, Homo sapiens; identical to SEQ ID NO: 480749
  chr21:33245718-33245794
  hyper
  upper_gi vs. pancreas_gallbladder,colorectal

SEQ ID NO: 480753 - DNA, 133 bp, Homo sapiens; identical to SEQ ID NO: 480750
  chr21:33245877-33246010
  hyper
  upper_gi vs. pancreas_gallbladder,colorectal

SEQ ID NO: 480754 - DNA, 129 bp, Homo sapiens; identical to SEQ ID NO: 352547
  chr21:33246414-33246543
  hyper
  upper_gi vs. pancreas_gallbladder,colorectal

SEQ ID NO: 480755 - DNA, 31 bp, Homo sapiens; identical to SEQ ID NO: 461004
  chr21:38119724-38119755
  hyper
  upper_gi vs. liver_bileduct

SEQ ID NO: 480756 - DNA, 2 bp, Homo sapiens
  chr21:38120712-38120714
  hyper
  upper_gi vs. liver_bileduct
cc

SEQ ID NO: 480757 - DNA, 238 bp, Homo sapiens; identical to SEQ ID NO: 474092
  chr22:17849877-17850115
  hyper
  upper_gi vs. lung

SEQ ID NO: 480758 - DNA, 238 bp, Homo sapiens; identical to SEQ ID NO: 474092
  chr22:17849877-17850115
  hyper
  upper_gi vs. bladder_and_urothelial,lung

SEQ ID NO: 480759 - DNA, 187 bp, Homo sapiens; identical to SEQ ID NO: 295268
  chr22:24552924-24553111
  hyper
  upper_gi vs. melanoma,anorectal,pancreas_gallbladder, lymphoid_neoplasm,cervical,liver_bileduct,sarcoma,breast, bladder_and_urothelial,non_cancer,multiple_myeloma, myeloid_neoplasm

SEQ ID NO: 480760 - DNA, 945 bp, Homo sapiens
  chr22:25960137-25961082
  hyper
  upper_gi vs. colorectal,lymphoid_neoplasm
cggggagccgtcaccccactttgttctgcttagcctaagacacgcaactttttccagcttttactcttcgctgaattctcacggtggggttggggggatgttcaggctcaggagcgaggttgggggcccggcccgctgggcgctgttcaccggtagcccggaccagagcaggagtttcatcattacctgctgggataggtgggacacatgtatttccggggccaccccagacctcccggaggatgctgattgacactgtccagtttgagaactactgtgtccagggagcagaggcctccccataaccccttgggttgtggacgtctggcccagggcttctctgggtgagcggggcgggcatcagagcgcgtggaacctggggcgggaggtcggggcagtgaaggaggaggagaaggaggaggcggagaccgagggggagggaggggaggaggaagaggaggaggagtccctcgtggccaccccgaggggagggcgaccgtagagacttggtcgggaggcgccggcccagcgaggccgctgggactgtgcactgaggggcgctgaccgttggacgcgcgctccccgcagaccctcgctgaaggagcagggggcggcgcgcgtgcgcggggcgccgggcggcgcgcgagggggcggagcggggaggcgtgctgcgaccccggccggctacagcctgcggcgcgcgcagagcgctagtggggcgcgcggcgcgcgcgcggggcgggggcgcgcggaggggggggctgccccggggcggcccccccaggtcggggcgcggcgggcggcggcggcgggcgcgcgtcccgtccaggtccggagtaaccgccgccgccgccgccaaagctcgccaacatggcggacctggaggctgtgctggccgatgtcagttacctgatggccatggagaagagcaaggcgaccccggcc

SEQ ID NO: 480761 - DNA, 474 bp, Homo sapiens
  chr22:25960608-25961082
  hyper
  upper_gi vs. colorectal,lung,lymphoid_neoplasm, pancreas_gallbladder
cgtggccaccccgaggggagggcgaccgtagagacttggtcgggaggcgccggcccagcgaggccgctgggactgtgcactgaggggcgctgaccgttggacgcgcgctccccgcagaccctcgctgaaggagcagggggcggcgcgcgtgcgcggggcgccgggcggcgcgcgagggggcggagcggggaggcgtgctgcgaccccggccggctacagcctgcggcgcgcgcagagcgctagtggggcgcgcggcgcgcgcgcggggcgggggcgcgcggaggggggggctgccccggggcggcccccccaggtcggggcgcggcgggcggcggcggcgggcgcgcgtcccgtccaggtccggagtaaccgccgccgccgccgccaaagctcgccaacatggcggacctggaggctgtgctggccgatgtcagttacctgatggccatggagaagagcaaggcgaccccggcc

SEQ ID NO: 480762 - DNA, 248 bp, Homo sapiens; identical to SEQ ID NO: 57883
  chr22:25961110-25961358
  hyper
  upper_gi vs. colorectal,lung,lymphoid_neoplasm, pancreas_gallbladder

SEQ ID NO: 480763 - DNA, 97 bp, Homo sapiens; identical to SEQ ID NO: 455955
  chr22:27053098-27053195
  hyper
  upper_gi vs. colorectal

SEQ ID NO: 480764 - DNA, 268 bp, Homo sapiens; identical to SEQ ID NO: 455956
  chr22:27053250-27053518
  hyper
  upper_gi vs. colorectal

SEQ ID NO: 480765 - DNA, 300 bp, Homo sapiens
  chr22:27068622-27068922
  hyper
  upper_gi vs. pancreas_gallbladder
cgaggggggcgtatcccacgaggaaggcaggagggggcgtgcccctcaccggaaattagcagaggggcgtgtcccacaccggaagtcagaaagcggagcctttcttacaccggaagtcaatgaagcgggtctttcctacgctaaaaaccactgagtggagtatttagtacacaggaagtcggccagagaaacatttctcatatttgaaggccggaaagagggacatttctgacaccggaagtcagtgagaggactctttcccacacaggaagtcagctagagagccgtctcccctctctg

SEQ ID NO: 480766 - DNA, 1 bp, Homo sapiens
  chr22:27069238-27069239
  hyper
  upper_gi vs. pancreas_gallbladder
c

SEQ ID NO: 480767 - DNA, 1 bp, Homo sapiens
  chr22:29075313-29075314
  hyper
  upper_gi vs. cervical,lung,renal,ovary,uterine,breast, head_and_neck,sarcoma,melanoma
c

SEQ ID NO: 480768 - DNA, 64 bp, Homo sapiens
  chr22:29075343-29075407
  hyper
  upper_gi vs. cervical,lung,renal,ovary,uterine,breast, head_and_neck,sarcoma,melanoma
cgacaccccccaccccggtgtgcgcaggccaacacccatacacaccctcacacacccacacaca

SEQ ID NO: 480769 - DNA, 321 bp, Homo sapiens
  chr22:39549067-39549388
  hyper
  upper_gi vs. cervical
cgaggcgcagcccctcgagttgcaggagagccgggacccaaaaggcttcccaccgtgtccggacgtcgcagggccgaggtctccctaatccggccttctccgcggcgcagtttggccagtgtctccacgtccgtccacccacccctccatccgcccttccatttgtccatccacccgaccctcggtggtcggtgcccagacgcacgggtcagacgcgggcgctgcctcgagggctcccgggccgggccctcgttcgcggcaggagcggccgcggtggagctgaggtcccccggggacggattttgccgccgcgctgcccca

SEQ ID NO: 480770 - DNA, 137 bp, Homo sapiens; identical to SEQ ID NO: 352610
  chr22:39549472-39549609
  hyper
  upper_gi vs. cervical

SEQ ID NO: 480771 - DNA, 149 bp, Homo sapiens; identical to SEQ ID NO: 459667
  chr22:39852943-39853092
  hyper
  upper_gi vs. bladder_and_urothelial,ovary, pancreas_gallbladder,anorectal,cervical,prostate,head_and_neck

SEQ ID NO: 480772 - DNA, 226 bp, Homo sapiens; identical to SEQ ID NO: 459668
  chr22:39853157-39853383
  hyper
  upper_gi vs. bladder_and_urothelial,ovary, pancreas_gallbladder,anorectal,cervical,prostate,head_and_neck

SEQ ID NO: 480773 - DNA, 32 bp, Homo sapiens; identical to SEQ ID NO: 459669
  chr22:39853626-39853658
  hyper
  upper_gi vs. bladder_and_urothelial,ovary, pancreas_gallbladder,anorectal,cervical,prostate,head_and_neck

SEQ ID NO: 480774 - DNA, 56 bp, Homo sapiens; identical to SEQ ID NO: 459670
  chr22:39853690-39853746
  hyper
  upper_gi vs. bladder_and_urothelial,ovary, pancreas_gallbladder,anorectal,cervical,prostate,head_and_neck

SEQ ID NO: 480775 - DNA, 128 bp, Homo sapiens; identical to SEQ ID NO: 459671
  chr22:39853255-39853383
  hyper
  upper_gi vs. bladder_and_urothelial,ovary, pancreas_gallbladder,anorectal,cervical,prostate,head_and_neck, lymphoid_neoplasm

SEQ ID NO: 480776 - DNA, 32 bp, Homo sapiens; identical to SEQ ID NO: 459669
  chr22:39853626-39853658
  hyper
  upper_gi vs. bladder_and_urothelial,ovary, pancreas_gallbladder,anorectal,cervical,prostate,head_and_neck, lymphoid_neoplasm

SEQ ID NO: 480777 - DNA, 210 bp, Homo sapiens; identical to SEQ ID NO: 459673
  chr22:39853690-39853900
  hyper
  upper_gi vs. bladder_and_urothelial,ovary, pancreas_gallbladder,anorectal,cervical,prostate,head_and_neck, lymphoid_neoplasm

SEQ ID NO: 480778 - DNA, 130 bp, Homo sapiens; identical to SEQ ID NO: 345661
  chr22:39853934-39854064
  hyper
  upper_gi vs. bladder_and_urothelial,ovary, pancreas_gallbladder,anorectal,cervical,prostate,head_and_neck, lymphoid_neoplasm

SEQ ID NO: 480779 - DNA, 177 bp, Homo sapiens; identical to SEQ ID NO: 462796
  chr22:45405768-45405945
  hyper
  upper_gi vs. cervical

SEQ ID NO: 480780 - DNA, 177 bp, Homo sapiens; identical to SEQ ID NO: 462796
  chr22:45405768-45405945
  hyper
  upper_gi vs. anorectal

SEQ ID NO: 480781 - DNA, 178 bp, Homo sapiens; identical to SEQ ID NO: 362097
  chr22:45406385-45406563
  hyper
  upper_gi vs. anorectal

SEQ ID NO: 480782 - DNA, 82 bp, Homo sapiens
  chr3:3840349-3840431
  hyper
  upper_gi vs. pancreas_gallbladder
cgcaggttcacgcgcagtttccgaagacctattccgtccccaccctcctccccttcctcggagacacctccacttaacactg

SEQ ID NO: 480783 - DNA, 902 bp, Homo sapiens; identical to SEQ ID NO: 469095
  chr3:13460995-13461897
  hyper
  upper_gi vs. liver_bileduct

SEQ ID NO: 480784 - DNA, 1 bp, Homo sapiens
  chr3:13590414-13590415
  hyper
  upper_gi vs. anorectal,cervical
c

SEQ ID NO: 480785 - DNA, 370 bp, Homo sapiens; identical to SEQ ID NO: 455964
  chr3:16553609-16553979
  hyper
  upper_gi vs. lymphoid_neoplasm,multiple_myeloma,renal, bladder_and_urothelial,myeloid_neoplasm,sarcoma,head_and_neck, non_cancer,liver_bileduct

SEQ ID NO: 480786 - DNA, 78 bp, Homo sapiens; identical to SEQ ID NO: 345081
  chr3:16555426-16555504
  hyper
  upper_gi vs. anorectal,lung,lymphoid_neoplasm,ovary, multiple_myeloma,bladder_and_urothelial,renal,sarcoma, liver_bileduct,non_cancer,breast,myeloid_neoplasm,head_and_neck, thyroid,uterine

SEQ ID NO: 480787 - DNA, 241 bp, Homo sapiens
  chr3:36985571-36985812
  hyper
  upper_gi vs. pancreas_gallbladder,liver_bileduct
cgcaacgcgcctcccaggcaacagactccgagctccggttcggaaacgctccgaggcagaagcaagggcttctaagggctccgcttcccagccttgggtccctactactaccttccccctagactcggtgagcccaggctgatggaccgtgcagtccagtttgagccagcccagcagccctcaatcgggcgggcagggaagaaggcctcctactgccgggaagaggccagcgcgctccaag

SEQ ID NO: 480788 - DNA, 251 bp, Homo sapiens
  chr3:36986413-36986664
  hyper
  upper_gi vs. cervical,pancreas_gallbladder
gggcggcgcgatgcagaggcggcgttcgggggcccccagctgcctgcggctcggctacccagccgcgatcagagggggcgggggacgcaggaaccccggcgtccgggcggtgtgcagccgcagacctattccaagtttccacgtagttgcgagagcccaaaaactgtcacgtgcacgtcgctgctgagtgggaggaggtgtttgtcatcgcgttcaaaaggggcgtttcggtgtctcccgtcatgcaagca

SEQ ID NO: 480789 - DNA, 132 bp, Homo sapiens; identical to SEQ ID NO: 469114
  chr3:43935666-43935798
  hyper
  upper_gi vs. pancreas_gallbladder

SEQ ID NO: 480790 - DNA, 196 bp, Homo sapiens; identical to SEQ ID NO: 453202
  chr3:44038922-44039118
  hyper
  upper_gi vs. renal,thyroid,lung,non_cancer, bladder_and_urothelial

SEQ ID NO: 480791 - DNA, 71 bp, Homo sapiens; identical to SEQ ID NO: 346560
  chr3:44597031-44597102
  hyper
  upper_gi vs. renal

SEQ ID NO: 480792 - DNA, 202 bp, Homo sapiens; identical to SEQ ID NO: 457978
  chr3:54156155-54156357
  hyper
  upper_gi vs. head_and_neck,melanoma,anorectal,uterine, renal,sarcoma,prostate,breast

SEQ ID NO: 480793 - DNA, 202 bp, Homo sapiens; identical to SEQ ID NO: 457978
  chr3:54156155-54156357
  hyper
  upper_gi vs. head_and_neck,melanoma,sarcoma,breast

SEQ ID NO: 480794 - DNA, 196 bp, Homo sapiens; identical to SEQ ID NO: 457980
  chr3:55521390-55521586
  hyper
  upper_gi vs. head_and_neck,lung,anorectal,breast, bladder_and_urothelial,uterine,ovary,prostate,liver_bileduct

SEQ ID NO: 480795 - DNA, 347 bp, Homo sapiens; identical to SEQ ID NO: 457981
  chr3:55521390-55521737
  hyper
  upper_gi vs. lung,head_and_neck,breast,anorectal, pancreas_gallbladder,uterine,bladder_and_urothelial,ovary, liver_bileduct,prostate,renal,colorectal

SEQ ID NO: 480796 - DNA, 112 bp, Homo sapiens; identical to SEQ ID NO: 457982
  chr3:55521625-55521737
  hyper
  upper_gi vs. head_and_neck,lung,renal,anorectal, pancreas_gallbladder,breast

SEQ ID NO: 480797 - DNA, 36 bp, Homo sapiens
  chr3:55522560-55522596
  hyper
  upper_gi vs. bladder_and_urothelial,cervical
cgcatgcgtggtgaggccggcctatgacaaactctg

SEQ ID NO: 480798 - DNA, 325 bp, Homo sapiens
  chr3:96531754-96532079
  hyper
  upper_gi vs. liver_bileduct
cgctcccctgacctcttgtcactgtgccatttccctcctgtgctttctgcccacttggaaaatatcgtatatcctttacaagaccgctactttctctcctctgttcacatttctccattaccatccacattttctcaaaacattccgacgggttttgaagtggggttttcaacctccctcgactgtgatagccgaagtcccttcaagaaagaaaaatgatgttggaaatactagtaacaaataaagtatcacggaaatccccacccaagcgatacggtttccttgacgcgcccttaaccaaggcgttaagtttagcctgacagca

SEQ ID NO: 480799 - DNA, 281 bp, Homo sapiens; identical to SEQ ID NO: 467226
  chr3:98619774-98620055
  hyper
  upper_gi vs. pancreas_gallbladder,colorectal, liver_bileduct,lung,head_and_neck,cervical,melanoma

SEQ ID NO: 480800 - DNA, 58 bp, Homo sapiens; identical to SEQ ID NO: 345096
  chr3:98621126-98621184
  hyper
  upper_gi vs. pancreas_gallbladder,colorectal, liver_bileduct,lung,head_and_neck

SEQ ID NO: 480801 - DNA, 129 bp, Homo sapiens; identical to SEQ ID NO: 458001
  chr3:120626737-120626866
  hyper
  upper_gi vs. colorectal

SEQ ID NO: 480802 - DNA, 60 bp, Homo sapiens; identical to SEQ ID NO: 229708
  chr3:120627258-120627318
  hyper
  upper_gi vs. colorectal

SEQ ID NO: 480803 - DNA, 60 bp, Homo sapiens; identical to SEQ ID NO: 229708
  chr3:120627258-120627318
  hyper
  upper_gi vs. colorectal

SEQ ID NO: 480804 - DNA, 1 bp, Homo sapiens
  chr3:120628011-120628012
  hyper
  upper_gi vs. colorectal
c

SEQ ID NO: 480805 - DNA, 54 bp, Homo sapiens; identical to SEQ ID NO: 459688
  chr3:121902674-121902728
  hyper
  upper_gi vs. pancreas_gallbladder

SEQ ID NO: 480806 - DNA, 277 bp, Homo sapiens
  chr3:123168265-123168542
  hyper
  upper_gi vs. pancreas_gallbladder
cggcccggagagctgtcgcgcccgcttcgcaagccccaagctcctcgtcgccggctgcgggcccaccgcggccggcgcggaacgactaggcggaggacggaatccggcgcagcgctgccgcggttctgccccgacgcaggcaggcttctcccggggagtaaggcatccagagatccagcgccggggctcagaagcagccggcccagaggggcccgcctgagagccgcggcgcccgagaggcgctccgggggggcccgcgggagcccggctcagggcg

SEQ ID NO: 480807 - DNA, 173 bp, Homo sapiens; identical to SEQ ID NO: 370185
  chr3:123168908-123169081
  hyper
  upper_gi vs. pancreas_gallbladder

SEQ ID NO: 480808 - DNA, 601 bp, Homo sapiens; identical to SEQ ID NO: 331858
  chr3:128336511-128337112
  hyper
  upper_gi vs. pancreas_gallbladder,liver_bileduct, lymphoid_neoplasm

SEQ ID NO: 480809 - DNA, 49 bp, Homo sapiens; identical to SEQ ID NO: 453213
  chr3:129694299-129694348
  hyper
  upper_gi vs. multiple_myeloma,prostate,non_cancer

SEQ ID NO: 480810 - DNA, 248 bp, Homo sapiens
  chr3:137488090-137488338
  hyper
  upper_gi vs. liver_bileduct
cgccggcgcggcaggagcagagttgtttgggttttacctaggtttgctttcttaaaccttggctgccatctggctcaggggtacactggctacatcttcagagagatgtggaattcttgacccctttccgcctctggcctccctcattccgagaactccgtcagcctttcatgcacttctcggttttggatctgactccaaaaatctttgattcccttccagtttccgagtttttctatttaaatatt

SEQ ID NO: 480811 - DNA, 22 bp, Homo sapiens
  chr3:139258159-139258181
  hyper
  upper_gi vs. pancreas_gallbladder
cgaggacgccctttctggcgtc

SEQ ID NO: 480812 - DNA, 267 bp, Homo sapiens; identical to SEQ ID NO: 349830
  chr3:139258672-139258939
  hyper
  upper_gi vs. pancreas_gallbladder

SEQ ID NO: 480813 - DNA, 16 bp, Homo sapiens
  chr3:139653430-139653446
  hyper
  upper_gi vs. myeloid_neoplasm
cgcggctgcccctgct

SEQ ID NO: 480814 - DNA, 79 bp, Homo sapiens; identical to SEQ ID NO: 346596
  chr3:139655101-139655180
  hyper
  upper_gi vs. anorectal,breast

SEQ ID NO: 480815 - DNA, 18 bp, Homo sapiens
  chr3:142681815-142681833
  hyper
cggtagcagccacgggtg

SEQ ID NO: 480816 - DNA, 15 bp, Homo sapiens
  chr3:142837817-142837832
  hyper
  upper_gi vs. ovary,uterine,renal,lymphoid_neoplasm, multiple_myeloma,myeloid_neoplasm,non_cancer,melanoma, bladder_and_urothelial,thyroid
cgggacaagtatttt

SEQ ID NO: 480817 - DNA, 86 bp, Homo sapiens; identical to SEQ ID NO: 458017
  chr3:150802802-150802888
  hyper
  upper_gi vs. lung,breast,multiple_myeloma, bladder_and_urothelial,uterine,pancreas_gallbladder,ovary, prostate,myeloid_neoplasm

SEQ ID NO: 480818 - DNA, 70 bp, Homo sapiens; identical to SEQ ID NO: 357722
  chr3:150805097-150805167
  hyper
  upper_gi vs. uterine,myeloid_neoplasm, bladder_and_urothelial,breast,prostate,thyroid

SEQ ID NO: 480819 - DNA, 98 bp, Homo sapiens; identical to SEQ ID NO: 349842
  chr3:152553725-152553823
  hyper
  upper_gi vs. colorectal

SEQ ID NO: 480820 - DNA, 64 bp, Homo sapiens; identical to SEQ ID NO: 453219
  chr3:154797121-154797185
  hyper
  upper_gi vs. pancreas_gallbladder

SEQ ID NO: 480821 - DNA, 121 bp, Homo sapiens; identical to SEQ ID NO: 453220
  chr3:154797214-154797335
  hyper
  upper_gi vs. pancreas_gallbladder

SEQ ID NO: 480822 - DNA, 309 bp, Homo sapiens
  chr3:167967629-167967938
  hyper
  upper_gi vs. bladder_and_urothelial
cgacaagcccaacttctgcgccgggttcggacttgcggagccggaacggcgcaccgcgcgcagcccgggcggcggccagggcggatcagcctcgccgagatgtcctcgcgactgtggctctggtgcttctgcctgggcggttgccggctggccgccaggaagcgccctacagctccggctgggcatgtaagtggcgcccgcgcgctccggaacgcttggagagagcagacaacagtatgccccgccccacctcggacctggtgcggacaccgcggcccgagcccgggaagggatggggggcaggaggtg

SEQ ID NO: 480823 - DNA, 99 bp, Homo sapiens; identical to SEQ ID NO: 370274
  chr3:167968382-167968481
  hyper
  upper_gi vs. bladder_and_urothelial

SEQ ID NO: 480824 - DNA, 138 bp, Homo sapiens; identical to SEQ ID NO: 345119
  chr3:179169640-179169778
  hyper
  upper_gi vs. cervical,head_and_neck,breast,ovary,uterine, bladder_and_urothelial,lung,melanoma,prostate

SEQ ID NO: 480825 - DNA, 3 bp, Homo sapiens
  chr3:186078710-186078713
  hyper
  upper_gi vs. lymphoid_neoplasm
cgt

SEQ ID NO: 480826 - DNA, 133 bp, Homo sapiens; identical to SEQ ID NO: 453234
  chr3:186079331-186079464
  hyper
  upper_gi vs. lymphoid_neoplasm

SEQ ID NO: 480827 - DNA, 291 bp, Homo sapiens; identical to SEQ ID NO: 453235
  chr3:186079331-186079622
  hyper
  upper_gi vs. myeloid_neoplasm,lymphoid_neoplasm,thyroid, prostate,multiple_myeloma,non_cancer,sarcoma

SEQ ID NO: 480828 - DNA, 125 bp, Homo sapiens; identical to SEQ ID NO: 453236
  chr3:186079497-186079622
  hyper
  upper_gi vs. ovary,multiple_myeloma,pancreas_gallbladder, lymphoid_neoplasm

SEQ ID NO: 480829 - DNA, 56 bp, Homo sapiens; identical to SEQ ID NO: 349888
  chr3:192128140-192128196
  hyper
  upper_gi vs. renal,ovary,myeloid_neoplasm,thyroid, sarcoma,prostate,non_cancer

SEQ ID NO: 480830 - DNA, 211 bp, Homo sapiens
  chr4:331352-331563
  hyper
  upper_gi vs. pancreas_gallbladder,breast,ovary,lung, bladder_and_urothelial,sarcoma
cacaaggttaaaaaatgacccctgggctgtgccaggccaagcacgaagagaaagccccgcctgaaactgcctggaggccccccggctgtcactctcgccacattccgtggagtatgtggttgcaacttctgtcactcaaggtctgatggcggggagattggagccgtatccaatcagcgcactggagtgaaaactgcccaatcaggcacgc

SEQ ID NO: 480831 - DNA, 211 bp, Homo sapiens; identical to SEQ ID NO: 480830
  chr4:331352-331563
  hyper
  upper_gi vs. breast

SEQ ID NO: 480832 - DNA, 207 bp, Homo sapiens; identical to SEQ ID NO: 467287
  chr4:6201673-6201880
  hyper
  upper_gi vs. bladder_and_urothelial,lung

SEQ ID NO: 480833 - DNA, 80 bp, Homo sapiens; identical to SEQ ID NO: 453239
  chr4:6201800-6201880
  hyper
  upper_gi vs. lung,renal,ovary,breast

SEQ ID NO: 480834 - DNA, 65 bp, Homo sapiens; identical to SEQ ID NO: 346630
  chr4:6202658-6202723
  hyper
  upper_gi vs. lung,renal,ovary,breast

SEQ ID NO: 480835 - DNA, 120 bp, Homo sapiens; identical to SEQ ID NO: 467293
  chr4:7194882-7195002
  hyper
  upper_gi vs. lung

SEQ ID NO: 480836 - DNA, 44 bp, Homo sapiens; identical to SEQ ID NO: 459708
  chr4:10458329-10458373
  hyper
  upper_gi vs. anorectal,prostate,cervical,breast,sarcoma, uterine,thyroid

SEQ ID NO: 480837 - DNA, 25 bp, Homo sapiens
  chr4:10459327-10459352
  hyper
  upper_gi vs. anorectal,prostate,breast,non_cancer, uterine,head_and_neck,cervical,sarcoma,thyroid
gggtcccgcggagggcggccttggc

SEQ ID NO: 480838 - DNA, 29 bp, Homo sapiens
  chr4:13549864-13549893
  hyper
  upper_gi vs. uterine,sarcoma
gcgatccaaaccgcctaagcatcccaagc

SEQ ID NO: 480839 - DNA, 83 bp, Homo sapiens; identical to SEQ ID NO: 474156
  chr4:20253975-20254058
  hyper
  upper_gi vs. lung

SEQ ID NO: 480840 - DNA, 196 bp, Homo sapiens; identical to SEQ ID NO: 357847
  chr4:20254323-20254519
  hyper
  upper_gi vs. lung

SEQ ID NO: 480841 - DNA, 16 bp, Homo sapiens
  chr4:41259850-41259866
  hyper
  upper_gi vs. cervical
aggtgatgcggggcgc

SEQ ID NO: 480842 - DNA, 3 bp, Homo sapiens
  chr4:42155097-42155100
  hyper
  upper_gi vs. prostate,thyroid,non_cancer, myeloid_neoplasm
gac

SEQ ID NO: 480843 - DNA, 25 bp, Homo sapiens
  chr4:42401057-42401082
  hyper
  upper_gi vs. uterine,multiple_myeloma
ctgacttcagagcggaataaatcac

SEQ ID NO: 480844 - DNA, 6 bp, Homo sapiens
  chr4:57521376-57521382
  hyper
  upper_gi vs. myeloid_neoplasm,non_cancer, multiple_myeloma,sarcoma,ovary,uterine,cervical,thyroid, anorectal,lymphoid_neoplasm,prostate
cgggga

SEQ ID NO: 480845 - DNA, 94 bp, Homo sapiens; identical to SEQ ID NO: 458065
  chr4:57687545-57687639
  hyper
  upper_gi vs. colorectal,lung,anorectal,ovary, head_and_neck,bladder_and_urothelial

SEQ ID NO: 480846 - DNA, 205 bp, Homo sapiens; identical to SEQ ID NO: 346643
  chr4:57687887-57688092
  hyper
  upper_gi vs. colorectal,lung,anorectal,ovary, head_and_neck,bladder_and_urothelial

SEQ ID NO: 480847 - DNA, 428 bp, Homo sapiens; identical to SEQ ID NO: 458067
  chr4:58029764-58030192
  hyper
  upper_gi vs. colorectal

SEQ ID NO: 480848 - DNA, 1 bp, Homo sapiens
  chr4:58030524-58030525
  hyper
  upper_gi vs. colorectal
c

SEQ ID NO: 480849 - DNA, 231 bp, Homo sapiens
  chr4:75858228-75858459
  hyper
  upper_gi vs. colorectal
cgccgcggggcccgggtgggaggggtttggcagcggcaggcgcggcggcggcggcggaggcggaggcggccccgggctcgggcggctgggatggagcagaagagcgcggagcaccggagggcacgcagctgacggagctgcgctgcgttcgcctcgtttgcctcgcgccctccactggagctgttcgcgcctcccggctcccaccgcagcccacccggcagaggagtcgct

SEQ ID NO: 480850 - DNA, 50 bp, Homo sapiens
  chr4:75858524-75858574
  hyper
  upper_gi vs. colorectal
ataccaggctaccatggtctacaagactctcttcgctctttgcatcttaa

SEQ ID NO: 480851 - DNA, 291 bp, Homo sapiens
  chr4:75858629-75858920
  hyper
  upper_gi vs. colorectal
tagctagcgcgtggtcggggctgaagctaggagatccggcagtgagtcgccgcgcgcctccgggtgagtgcgcaggtgtgtgcgcacttagatttggggtgacgtgcacctttggcggtcccgaaccgtactgagggaggggacgatggggtccttcctgccgcagcccgcgcccgcacaaactccagctttgtagaacaggtggctgtcttagctgcgtgttcgaacccagagtgggcaacacggactgcgcctcaaggcttctctttcttcaccagggtttcggagcgc

SEQ ID NO: 480852 - DNA, 76 bp, Homo sapiens
  chr4:75858998-75859074
  hyper
  upper_gi vs. colorectal
gggaggttcgcatctgggaaggcttcagcagcggctgcgcgcctggcggggctggtttgctttctcgagtcttggc

SEQ ID NO: 480853 - DNA, 291 bp, Homo sapiens; identical to SEQ ID NO: 480851
  chr4:75858629-75858920
  hyper
  upper_gi vs. colorectal

SEQ ID NO: 480854 - DNA, 366 bp, Homo sapiens
  chr4:75858998-75859364
  hyper
  upper_gi vs. colorectal
gggaggttcgcatctgggaaggcttcagcagcggctgcgcgcctggcggggctggtttgctttctcgagtcttggcggtctctgatctccggcgtcccttcctagttatgcttaggatgatgtggcactaacagcagcggcccggccttggtcaggctcgcaatcgtcactgggggtagcaaggctaccttctgccccagaactccccaaaaacgtatcccatagaagaaactattaacttggctaaactagcatcctctcccctccccctgcaccacctctgaaaggcttcgtaggagccactctcgggtttcgggaccacagacggcgacgacctctggcagcggggatggggaagaggggagc

SEQ ID NO: 480855 - DNA, 144 bp, Homo sapiens; identical to SEQ ID NO: 370463
  chr4:75859428-75859572
  hyper
  upper_gi vs. colorectal

SEQ ID NO: 480856 - DNA, 13 bp, Homo sapiens
  chr4:81951925-81951938
  hyper
  upper_gi vs. bladder_and_urothelial,lung,ovary,cervical, prostate,multiple_myeloma,non_cancer
cgtacactaaaaa

SEQ ID NO: 480857 - DNA, 184 bp, Homo sapiens; identical to SEQ ID NO: 467344
  chr4:87515033-87515217
  hyper
  upper_gi vs. colorectal

SEQ ID NO: 480858 - DNA, 207 bp, Homo sapiens; identical to SEQ ID NO: 462852
  chr4:109088463-109088670
  hyper
  upper_gi vs. colorectal

SEQ ID NO: 480859 - DNA, 207 bp, Homo sapiens; identical to SEQ ID NO: 462852
  chr4:109088463-109088670
  hyper
  upper_gi vs. colorectal

SEQ ID NO: 480860 - DNA, 443 bp, Homo sapiens; identical to SEQ ID NO: 370517
  chr4:109089314-109089757
  hyper
  upper_gi vs. colorectal

SEQ ID NO: 480861 - DNA, 140 bp, Homo sapiens; identical to SEQ ID NO: 474166
  chr4:111543735-111543875
  hyper
  upper_gi vs. colorectal

SEQ ID NO: 480862 - DNA, 233 bp, Homo sapiens; identical to SEQ ID NO: 461074
  chr4:111543735-111543968
  hyper
  upper_gi vs. colorectal

SEQ ID NO: 480863 - DNA, 61 bp, Homo sapiens; identical to SEQ ID NO: 461075
  chr4:111543907-111543968
  hyper
  upper_gi vs. colorectal

SEQ ID NO: 480864 - DNA, 5 bp, Homo sapiens
  chr4:113435438-113435443
  hyper
  upper_gi vs. sarcoma,cervical,head_and_neck,non_cancer, uterine,thyroid,ovary,bladder_and_urothelial
cgaac

SEQ ID NO: 480865 - DNA, 300 bp, Homo sapiens; identical to SEQ ID NO: 462855
  chr4:113435475-113435775
  hyper
  upper_gi vs. sarcoma,cervical,head_and_neck,non_cancer, uterine,thyroid,ovary,bladder_and_urothelial

SEQ ID NO: 480866 - DNA, 243 bp, Homo sapiens; identical to SEQ ID NO: 462856
  chr4:113436585-113436828
  hyper
  upper_gi vs. sarcoma,uterine,cervical,ovary,thyroid, head_and_neck,non_cancer,lymphoid_neoplasm,breast, bladder_and_urothelial,prostate,myeloid_neoplasm

SEQ ID NO: 480867 - DNA, 243 bp, Homo sapiens; identical to SEQ ID NO: 462856
  chr4:113436585-113436828
  hyper
  upper_gi vs. anorectal,head_and_neck,cervical,renal, breast,ovary,uterine,sarcoma,colorectal,prostate,lung, lymphoid_neoplasm

SEQ ID NO: 480868 - DNA, 25 bp, Homo sapiens
  chr4:113437315-113437340
  hyper
  upper_gi vs. anorectal,head_and_neck,cervical,renal, breast,ovary,uterine,sarcoma,colorectal,prostate,lung, lymphoid_neoplasm
ttcagtggctgcgtgtctggcacac

SEQ ID NO: 480869 - DNA, 113 bp, Homo sapiens; identical to SEQ ID NO: 462859
  chr4:113438278-113438391
  hyper
  upper_gi vs. bladder_and_urothelial

SEQ ID NO: 480870 - DNA, 229 bp, Homo sapiens; identical to SEQ ID NO: 464557
  chr4:113438278-113438507
  hyper
  upper_gi vs. bladder_and_urothelial

SEQ ID NO: 480871 - DNA, 71 bp, Homo sapiens; identical to SEQ ID NO: 458079
  chr4:123747655-123747726
  hyper
  upper_gi vs. renal,head_and_neck,sarcoma, multiple_myeloma,ovary,non_cancer

SEQ ID NO: 480872 - DNA, 225 bp, Homo sapiens; identical to SEQ ID NO: 357959
  chr4:123748993-123749218
  hyper
  upper_gi vs. multiple_myeloma,renal,lymphoid_neoplasm, head_and_neck,sarcoma

SEQ ID NO: 480873 - DNA, 353 bp, Homo sapiens; identical to SEQ ID NO: 458081
  chr4:141293964-141294317
  hyper
  upper_gi vs. colorectal,liver_bileduct,head_and_neck, bladder_and_urothelial,uterine,lung,breast,melanoma,ovary, anorectal,prostate,renal,sarcoma,multiple_myeloma, myeloid_neoplasm,non_cancer,thyroid,cervical,lymphoid_neoplasm

SEQ ID NO: 480874 - DNA, 104 bp, Homo sapiens; identical to SEQ ID NO: 458082
  chr4:141294418-141294522
  hyper
  upper_gi vs. colorectal,liver_bileduct,head_and_neck, bladder_and_urothelial,uterine,lung,breast,melanoma,ovary, anorectal,prostate,renal,sarcoma,multiple_myeloma, myeloid_neoplasm,non_cancer,thyroid,cervical,lymphoid_neoplasm

SEQ ID NO: 480875 - DNA, 89 bp, Homo sapiens; identical to SEQ ID NO: 458083
  chr4:141294545-141294634
  hyper
  upper_gi vs. colorectal,liver_bileduct,head_and_neck, bladder_and_urothelial,uterine,lung,breast,melanoma,ovary, anorectal,prostate,renal,sarcoma,multiple_myeloma, myeloid_neoplasm,non_cancer,thyroid,cervical,lymphoid_neoplasm

SEQ ID NO: 480876 - DNA, 104 bp, Homo sapiens; identical to SEQ ID NO: 458082
  chr4:141294418-141294522
  hyper
  upper_gi vs. colorectal,bladder_and_urothelial,lung, head_and_neck,liver_bileduct,breast,melanoma,ovary,prostate, anorectal,renal,uterine,multiple_myeloma,sarcoma, myeloid_neoplasm,non_cancer,cervical,lymphoid_neoplasm

SEQ ID NO: 480877 - DNA, 89 bp, Homo sapiens; identical to SEQ ID NO: 458083
  chr4:141294545-141294634
  hyper
  upper_gi vs. colorectal,bladder_and_urothelial,lung, head_and_neck,liver_bileduct,breast,melanoma,ovary,prostate, anorectal,renal,uterine,multiple_myeloma,sarcoma, myeloid_neoplasm,non_cancer,cervical,lymphoid_neoplasm

SEQ ID NO: 480878 - DNA, 40 bp, Homo sapiens; identical to SEQ ID NO: 345144
  chr4:141295287-141295327
  hyper
  upper_gi vs. colorectal,bladder_and_urothelial,lung, head_and_neck,liver_bileduct,breast,melanoma,ovary,prostate, anorectal,renal,uterine,multiple_myeloma,sarcoma, myeloid_neoplasm,non_cancer,cervical,lymphoid_neoplasm

SEQ ID NO: 480879 - DNA, 61 bp, Homo sapiens; identical to SEQ ID NO: 459713
  chr4:142054594-142054655
  hyper
  upper_gi vs. ovary,liver_bileduct

SEQ ID NO: 480880 - DNA, 155 bp, Homo sapiens; identical to SEQ ID NO: 357972
  chr4:142054757-142054912
  hyper
  upper_gi vs. ovary,liver_bileduct

SEQ ID NO: 480881 - DNA, 105 bp, Homo sapiens
  chr4:150999250-150999355
  hyper
  upper_gi vs. colorectal
cgcggttacgtttcccaggcggaggagcgcgcgtcgcggctgcgcccattaacgcgcggcgccgggcaggagccgtcaggcgggcggggctgcccgggacccgca

SEQ ID NO: 480882 - DNA, 553 bp, Homo sapiens
  chr4:150999589-151000142
  hyper
  upper_gi vs. colorectal
aggggccagacacggccctctcagccccgaacggcgcgcgctgcccggcgggcgggatccgggcgcggccgaggcggcggcgctgcaccccgggcctgggcccgcgcgactcccccgggggcctctcccacgctccgcgccccgccccacccttccttccttcctcccctcggcgctcccgggagcgctcggcagacgcccgagctttgtgggcgcccgcgggcccagcgcgagcctcgggcggcccaactttgcctctcccggtcggctcccgagcgggacttgtgaggcgtggccgggtggaggaggcgcttgcgggggcgtggggctccccggcaggcgggaggcacggagcaagtcgcactggacaatgacctgggcagctcggcgctgcggacacttttagctgagggcgcgggcgggtcggctcctccgcggctcctcggccccacctgcgcggagagggcgggatgccagagccaggtgtcccggcgcgttaagggccctcgcagtcagacgtccctgcaccggcgctcgcacccttagtcggccc

SEQ ID NO: 480883 - DNA, 411 bp, Homo sapiens; identical to SEQ ID NO: 462865
  chr4:150999731-151000142
  hyper
  upper_gi vs. colorectal,lung

SEQ ID NO: 480884 - DNA, 124 bp, Homo sapiens; identical to SEQ ID NO: 346661
  chr4:151000581-151000705
  hyper
  upper_gi vs. colorectal,lung

SEQ ID NO: 480885 - DNA, 244 bp, Homo sapiens; identical to SEQ ID NO: 358009
  chr4:166300444-166300688
  hyper
  upper_gi vs. lung,head_and_neck,anorectal, pancreas_gallbladder

SEQ ID NO: 480886 - DNA, 829 bp, Homo sapiens; identical to SEQ ID NO: 346671
  chr5:472600-473429
  hyper
  upper_gi vs. liver_bileduct,pancreas_gallbladder

SEQ ID NO: 480887 - DNA, 966 bp, Homo sapiens; identical to SEQ ID NO: 469215
  chr5:472934-473900
  hyper
  upper_gi vs. liver_bileduct,pancreas_gallbladder

SEQ ID NO: 480888 - DNA, 829 bp, Homo sapiens; identical to SEQ ID NO: 469216
  chr5:473431-474260
  hyper
  upper_gi vs. liver_bileduct

SEQ ID NO: 480889 - DNA, 10 bp, Homo sapiens
  chr5:6449618-6449628
  hyper
  upper_gi vs. sarcoma,head_and_neck,uterine,anorectal, multiple_myeloma,thyroid
ggtctctgcc

SEQ ID NO: 480890 - DNA, 171 bp, Homo sapiens; identical to SEQ ID NO: 456015
  chr5:10564301-10564472
  hyper
  upper_gi vs. lymphoid_neoplasm,cervical,myeloid_neoplasm, thyroid,non_cancer,renal,ovary,sarcoma,head_and_neck, multiple_myeloma

SEQ ID NO: 480891 - DNA, 303 bp, Homo sapiens; identical to SEQ ID NO: 462872
  chr5:17216361-17216664
  hyper
  upper_gi vs. lymphoid_neoplasm

SEQ ID NO: 480892 - DNA, 4 bp, Homo sapiens
  chr5:17217138-17217142
  hyper
  upper_gi vs. lymphoid_neoplasm
caac

SEQ ID NO: 480893 - DNA, 53 bp, Homo sapiens; identical to SEQ ID NO: 462874
  chr5:17217629-17217682
  hyper
  upper_gi vs. lymphoid_neoplasm,anorectal

SEQ ID NO: 480894 - DNA, 11 bp, Homo sapiens
  chr5:36690646-36690657
  hyper
  upper_gi vs. cervical
gccgcttccgc

SEQ ID NO: 480895 - DNA, 786 bp, Homo sapiens; identical to SEQ ID NO: 332333
  chr5:37248996-37249782
  hyper
  upper_gi vs. liver_bileduct,pancreas_gallbladder

SEQ ID NO: 480896 - DNA, 278 bp, Homo sapiens; identical to SEQ ID NO: 467441
  chr5:42424338-42424616
  hyper
  upper_gi vs. anorectal,colorectal,breast,renal

SEQ ID NO: 480897 - DNA, 99 bp, Homo sapiens; identical to SEQ ID NO: 453281
  chr5:42950747-42950846
  hyper
  upper_gi vs. sarcoma,non_cancer,multiple_myeloma, myeloid_neoplasm,thyroid,lymphoid_neoplasm

SEQ ID NO: 480898 - DNA, 388 bp, Homo sapiens; identical to SEQ ID NO: 456025
  chr5:43017314-43017702
  hyper
  upper_gi vs. colorectal

SEQ ID NO: 480899 - DNA, 117 bp, Homo sapiens; identical to SEQ ID NO: 459731
  chr5:76506029-76506146
  hyper
  upper_gi vs. breast,anorectal

SEQ ID NO: 480900 - DNA, 96 bp, Homo sapiens; identical to SEQ ID NO: 358151
  chr5:76507202-76507298
  hyper
  upper_gi vs. ovary,bladder_and_urothelial,breast

SEQ ID NO: 480901 - DNA, 3 bp, Homo sapiens
  chr5:77147514-77147517
  hyper
  upper_gi vs. uterine,ovary,multiple_myeloma
cgc

SEQ ID NO: 480902 - DNA, 23 bp, Homo sapiens
  chr5:77148195-77148218
  hyper
  upper_gi vs. uterine,ovary,multiple_myeloma
gtttctgcaattatggcttaaac

SEQ ID NO: 480903 - DNA, 192 bp, Homo sapiens; identical to SEQ ID NO: 453297
  chr5:77148195-77148387
  hyper
  upper_gi vs. sarcoma,lymphoid_neoplasm,uterine,cervical

SEQ ID NO: 480904 - DNA, 38 bp, Homo sapiens; identical to SEQ ID NO: 456033
  chr5:77268330-77268368
  hyper
  upper_gi vs. myeloid_neoplasm,thyroid,ovary,non_cancer

SEQ ID NO: 480905 - DNA, 15 bp, Homo sapiens
  chr5:77269447-77269462
  hyper
  upper_gi vs. multiple_myeloma,myeloid_neoplasm, non_cancer,thyroid
ttccccgcggggctc

SEQ ID NO: 480906 - DNA, 42 bp, Homo sapiens; identical to SEQ ID NO: 462893
  chr5:79865662-79865704
  hyper
  upper_gi vs. sarcoma,uterine

SEQ ID NO: 480907 - DNA, 91 bp, Homo sapiens; identical to SEQ ID NO: 462894
  chr5:79865744-79865835
  hyper
  upper_gi vs. sarcoma,uterine

SEQ ID NO: 480908 - DNA, 69 bp, Homo sapiens; identical to SEQ ID NO: 350104
  chr5:80256566-80256635
  hyper
  upper_gi vs. colorectal

SEQ ID NO: 480909 - DNA, 225 bp, Homo sapiens
  chr5:80256566-80256791
  hyper
  upper_gi vs. colorectal
agcgtgcgctacaacgaggggcacgccctgtacctggcctttctggcgcgcaaggagggcaccaagcgcggcttcctgagtaagaagacggccgaggcgagccgctggcacgagaagtggttcgccctctaccagaatgtgctcttctacttcgagggcgagcagagctgccgcccggcgggcatgtacctcctggagggctgcagctgcgaacgaacgcccgcg

SEQ ID NO: 480910 - DNA, 8 bp, Homo sapiens
  chr5:80256997-80257005
  hyper
  upper_gi vs. colorectal
ctccttcc

SEQ ID NO: 480911 - DNA, 314 bp, Homo sapiens; identical to SEQ ID NO: 345177
  chr5:82769369-82769683
  hyper
  upper_gi vs. pancreas_gallbladder

SEQ ID NO: 480912 - DNA, 542 bp, Homo sapiens; identical to SEQ ID NO: 458116
  chr5:82769369-82769911
  hyper
  upper_gi vs. pancreas_gallbladder

SEQ ID NO: 480913 - DNA, 160 bp, Homo sapiens; identical to SEQ ID NO: 458117
  chr5:82769751-82769911
  hyper
  upper_gi vs. pancreas_gallbladder

SEQ ID NO: 480914 - DNA, 246 bp, Homo sapiens; identical to SEQ ID NO: 458118
  chr5:82770318-82770564
  hyper
  upper_gi vs. pancreas_gallbladder

SEQ ID NO: 480915 - DNA, 25 bp, Homo sapiens
  chr5:82770612-82770637
  hyper
  upper_gi vs. pancreas_gallbladder
ctgacccgagttccatccagacagc

SEQ ID NO: 480916 - DNA, 80 bp, Homo sapiens; identical to SEQ ID NO: 345180
  chr5:87957200-87957280
  hyper
  upper_gi vs. melanoma,uterine,prostate,myeloid_neoplasm, non_cancer,breast

SEQ ID NO: 480917 - DNA, 157 bp, Homo sapiens; identical to SEQ ID NO: 453301
  chr5:87969885-87970042
  hyper
  upper_gi vs. uterine,sarcoma,non_cancer,thyroid, colorectal,ovary,multiple_myeloma,myeloid_neoplasm,breast, prostate,renal

SEQ ID NO: 480918 - DNA, 317 bp, Homo sapiens; identical to SEQ ID NO: 453302
  chr5:87970918-87971235
  hyper
  upper_gi vs. uterine,myeloid_neoplasm,thyroid,non_cancer, sarcoma,multiple_myeloma,breast,melanoma,renal,ovary,colorectal, prostate

SEQ ID NO: 480919 - DNA, 600 bp, Homo sapiens; identical to SEQ ID NO: 453303
  chr5:87970918-87971518
  hyper
  upper_gi vs. uterine,myeloid_neoplasm,thyroid,non_cancer

SEQ ID NO: 480920 - DNA, 423 bp, Homo sapiens; identical to SEQ ID NO: 453309
  chr5:88179429-88179852
  hyper
  upper_gi vs. melanoma

SEQ ID NO: 480921 - DNA, 312 bp, Homo sapiens; identical to SEQ ID NO: 453310
  chr5:88179540-88179852
  hyper
  upper_gi vs. melanoma

SEQ ID NO: 480922 - DNA, 42 bp, Homo sapiens; identical to SEQ ID NO: 345186
  chr5:88180346-88180388
  hyper
  upper_gi vs. melanoma

SEQ ID NO: 480923 - DNA, 287 bp, Homo sapiens; identical to SEQ ID NO: 453312
  chr5:89854237-89854524
  hyper
  upper_gi vs. colorectal

SEQ ID NO: 480924 - DNA, 10 bp, Homo sapiens
  chr5:89854969-89854979
  hyper
  upper_gi vs. colorectal
ccccctaccc

SEQ ID NO: 480925 - DNA, 115 bp, Homo sapiens; identical to SEQ ID NO: 453314
  chr5:100236036-100236151
  hyper
  upper_gi vs. lung,lymphoid_neoplasm, bladder_and_urothelial,sarcoma,multiple_myeloma,renal,ovary, breast

SEQ ID NO: 480926 - DNA, 87 bp, Homo sapiens; identical to SEQ ID NO: 453315
  chr5:100238197-100238284
  hyper
  upper_gi vs. lymphoid_neoplasm,multiple_myeloma,lung, renal,thyroid

SEQ ID NO: 480927 - DNA, 345 bp, Homo sapiens; identical to SEQ ID NO: 453316
  chr5:100239724-100240069
  hyper
  upper_gi vs. lymphoid_neoplasm,bladder_and_urothelial, renal,sarcoma,thyroid,multiple_myeloma,non_cancer

SEQ ID NO: 480928 - DNA, 219 bp, Homo sapiens; identical to SEQ ID NO: 453319
  chr5:113696733-113696952
  hyper
  upper_gi vs. colorectal,uterine,prostate,ovary,breast

SEQ ID NO: 480929 - DNA, 139 bp, Homo sapiens; identical to SEQ ID NO: 458149
  chr5:113696813-113696952
  hyper
  upper_gi vs. colorectal,melanoma

SEQ ID NO: 480930 - DNA, 98 bp, Homo sapiens; identical to SEQ ID NO: 461143
  chr5:113698167-113698265
  hyper
  upper_gi vs. colorectal,melanoma

SEQ ID NO: 480931 - DNA, 98 bp, Homo sapiens; identical to SEQ ID NO: 461143
  chr5:113698167-113698265
  hyper
  upper_gi vs. colorectal

SEQ ID NO: 480932 - DNA, 57 bp, Homo sapiens
  chr5:113698330-113698387
  hyper
  upper_gi vs. colorectal
cgccgccagccccacgggcagcctcggcagtctgggctccgggcccccgctctcgca

SEQ ID NO: 480933 - DNA, 6 bp, Homo sapiens
  chr5:122424905-122424911
  hyper
  upper_gi vs. bladder_and_urothelial
cgtaaa

SEQ ID NO: 480934 - DNA, 1 bp, Homo sapiens
  chr5:126339372-126339373
  hyper
  upper_gi vs. head_and_neck,lymphoid_neoplasm
c

SEQ ID NO: 480935 - DNA, 27 bp, Homo sapiens
  chr5:127872819-127872846
  hyper
  upper_gi vs. melanoma,anorectal
cgcccaacccccggagagagggctttc

SEQ ID NO: 480936 - DNA, 1 bp, Homo sapiens
  chr5:136835144-136835145
  hyper
  upper_gi vs. bladder_and_urothelial,anorectal,melanoma, lung,uterine
c

SEQ ID NO: 480937 - DNA, 213 bp, Homo sapiens; identical to SEQ ID NO: 453341
  chr5:140855386-140855599
  hyper
  upper_gi vs. renal,breast,bladder_and_urothelial

SEQ ID NO: 480938 - DNA, 156 bp, Homo sapiens; identical to SEQ ID NO: 454425
  chr5:141931151-141931307
  hyper
  upper_gi vs. colorectal

SEQ ID NO: 480939 - DNA, 11 bp, Homo sapiens
  chr5:141931539-141931550
  hyper
  upper_gi vs. colorectal
ccctcccctcc

SEQ ID NO: 480940 - DNA, 283 bp, Homo sapiens; identical to SEQ ID NO: 459751
  chr5:142782217-142782500
  hyper
  upper_gi vs. pancreas_gallbladder

SEQ ID NO: 480941 - DNA, 125 bp, Homo sapiens; identical to SEQ ID NO: 459752
  chr5:142782625-142782750
  hyper
  upper_gi vs. pancreas_gallbladder

SEQ ID NO: 480942 - DNA, 410 bp, Homo sapiens; identical to SEQ ID NO: 345197
  chr5:142782794-142783204
  hyper
  upper_gi vs. pancreas_gallbladder

SEQ ID NO: 480943 - DNA, 718 bp, Homo sapiens; identical to SEQ ID NO: 454427
  chr5:142783958-142784676
  hyper
  upper_gi vs. liver_bileduct,pancreas_gallbladder,lung

SEQ ID NO: 480944 - DNA, 215 bp, Homo sapiens; identical to SEQ ID NO: 454428
  chr5:142784461-142784676
  hyper
  upper_gi vs. liver_bileduct,pancreas_gallbladder

SEQ ID NO: 480945 - DNA, 32 bp, Homo sapiens; identical to SEQ ID NO: 345199
  chr5:142785272-142785304
  hyper
  upper_gi vs. liver_bileduct,pancreas_gallbladder

SEQ ID NO: 480946 - DNA, 241 bp, Homo sapiens
  chr5:157001858-157002099
  hyper
  upper_gi vs. bladder_and_urothelial,lymphoid_neoplasm, uterine,head_and_neck,ovary,colorectal,lung,non_cancer, multiple_myeloma,melanoma
gaaactgaggaccaaagaaggcggccgtcgggttggcgtggaaagagagccctggtttccagtgccaccgcggacctcaacccgtggcgtggccttgggcaagtcctttcccttttgtgggcctcggtttccccatctgtgaaatgggtgcgtttgacttggccttcagtagggctcctgccagctcggggatccgaagtgtgtggctgcagatacccagcgagccatcccctagccaagg

SEQ ID NO: 480947 - DNA, 244 bp, Homo sapiens
  chr5:157002204-157002448
  hyper
  upper_gi vs. bladder_and_urothelial,lymphoid_neoplasm, uterine,head_and_neck,ovary,colorectal,lung,non_cancer, multiple_myeloma,melanoma
ggatgctcggcgttggcgagtgcagcgggcggtagagagaaagacagagagagaggcggagcggacacgagggaccgtgagaaaacggaggaggataagccccgagaacggcggaaagagaagccaaaagcagaaaaacagaggaaggagaaggcgagaagggaaggctagccagtgagcggaccggctgttttctggctgcgccgggtttccccgacctctgccacctcccagggcgcagaac

SEQ ID NO: 480948 - DNA, 244 bp, Homo sapiens; identical to SEQ ID NO: 480947
  chr5:157002204-157002448
  hyper
  upper_gi vs. bladder_and_urothelial,multiple_myeloma, head_and_neck,lymphoid_neoplasm,sarcoma,uterine,lung,colorectal, ovary,non_cancer,prostate,cervical,renal,thyroid,liver_bileduct

SEQ ID NO: 480949 - DNA, 290 bp, Homo sapiens; identical to SEQ ID NO: 346761
  chr5:157002817-157003107
  hyper
  upper_gi vs. bladder_and_urothelial,multiple_myeloma, head_and_neck,lymphoid_neoplasm,sarcoma,uterine,lung,colorectal, ovary,non_cancer,prostate,cervical,renal,thyroid,liver_bileduct

SEQ ID NO: 480950 - DNA, 210 bp, Homo sapiens; identical to SEQ ID NO: 458169
  chr5:176057164-176057374
  hyper
  upper_gi vs. head_and_neck

SEQ ID NO: 480951 - DNA, 117 bp, Homo sapiens; identical to SEQ ID NO: 459759
  chr5:178016455-178016572
  hyper
  upper_gi vs. anorectal,bladder_and_urothelial

SEQ ID NO: 480952 - DNA, 13 bp, Homo sapiens
  chr5:178017936-178017949
  hyper
  upper_gi vs. head_and_neck
cggacttcggtgc

SEQ ID NO: 480953 - DNA, 244 bp, Homo sapiens; identical to SEQ ID NO: 467515
  chr5:179498011-179498255
  hyper
  upper_gi vs. liver_bileduct

SEQ ID NO: 480954 - DNA, 505 bp, Homo sapiens; identical to SEQ ID NO: 467516
  chr5:179498363-179498868
  hyper
  upper_gi vs. liver_bileduct

SEQ ID NO: 480955 - DNA, 26 bp, Homo sapiens
  chr5:179498897-179498923
  hyper
  upper_gi vs. liver_bileduct
gcccatgggccctcggcgagggcggc

SEQ ID NO: 480956 - DNA, 197 bp, Homo sapiens; identical to SEQ ID NO: 467521
  chr5:179779452-179779649
  hyper
  upper_gi vs. lung

SEQ ID NO: 480957 - DNA, 61 bp, Homo sapiens; identical to SEQ ID NO: 453345
  chr6:391113-391174
  hyper
  upper_gi vs. thyroid,lymphoid_neoplasm,non_cancer, prostate,multiple_myeloma,myeloid_neoplasm,renal

SEQ ID NO: 480958 - DNA, 55 bp, Homo sapiens; identical to SEQ ID NO: 346767
  chr6:393764-393819
  hyper
  upper_gi vs. lymphoid_neoplasm,melanoma,myeloid_neoplasm

SEQ ID NO: 480959 - DNA, 166 bp, Homo sapiens; identical to SEQ ID NO: 462939
  chr6:1624812-1624978
  hyper

SEQ ID NO: 480960 - DNA, 52 bp, Homo sapiens; identical to SEQ ID NO: 459763
  chr6:1625068-1625120
  hyper

SEQ ID NO: 480961 - DNA, 52 bp, Homo sapiens; identical to SEQ ID NO: 459763
  chr6:1625068-1625120
  hyper
  upper_gi vs. sarcoma

SEQ ID NO: 480962 - DNA, 230 bp, Homo sapiens; identical to SEQ ID NO: 456063
  chr6:5084683-5084913
  hyper
  upper_gi vs. pancreas_gallbladder

SEQ ID NO: 480963 - DNA, 665 bp, Homo sapiens; identical to SEQ ID NO: 346775
  chr6:5084942-5085607
  hyper
  upper_gi vs. pancreas_gallbladder

SEQ ID NO: 480964 - DNA, 510 bp, Homo sapiens
  chr6:5085128-5085638
  hyper
  upper_gi vs. pancreas_gallbladder,colorectal,anorectal, head_and_neck,cervical
cgcgctgcaccggggactccccagcccgtgaggcagccaagaggagagcgctcagtgaccctctgggggcagagccgtcaggccaagttcatgggcaggaagactttgtgcacgtgggggtctctgaaggttgagcgcgagctctgcacccccacttcgaggcactcaagaagcggaacagacgcgagccccgccgggggtgcgggtgagggctgcagggagcccgcgaacgacagaaagtcgccccccgcattccaccggagcactcgggaacacggcttccaggtgtcccagcggccgcgcctccccgcccccggccctcccccgtcgcgggcaggttcaaccgggaggcggcgtggccccggagccggccccaggcccgcatcctcctcccacttcgccctgggcagccgcagctaaaagccggaggctccaaagtggaactacgttgtcttgtcgagcctggggcgactcgcctcggggagggcgagcctgaactgcagccctgcg

SEQ ID NO: 480965 - DNA, 23 bp, Homo sapiens
  chr6:5085615-5085638
  hyper
  upper_gi vs. anorectal,cervical
cgagcctgaactgcagccctgcg

SEQ ID NO: 480966 - DNA, 120 bp, Homo sapiens
  chr6:6546401-6546521
  hyper
  upper_gi vs. bladder_and_urothelial,breast
cgggtccttaacagctcccgccccagaagctgccttcggatgaacagccgggtgaatcgccatgaaaaattaatcagcctccgcctgtccgcggcctagatgggcgcaaagcagatgacc

SEQ ID NO: 480967 - DNA, 90 bp, Homo sapiens; identical to SEQ ID NO: 350270
  chr6:6547222-6547312
  hyper
  upper_gi vs. bladder_and_urothelial,breast

SEQ ID NO: 480968 - DNA, 78 bp, Homo sapiens; identical to SEQ ID NO: 459764
  chr6:11043624-11043702
  hyper
  upper_gi vs. liver_bileduct,ovary,uterine,prostate, head_and_neck,renal,breast

SEQ ID NO: 480969 - DNA, 462 bp, Homo sapiens; identical to SEQ ID NO: 358502
  chr6:37665241-37665703
  hyper
  upper_gi vs. pancreas_gallbladder

SEQ ID NO: 480970 - DNA, 334 bp, Homo sapiens; identical to SEQ ID NO: 453382
  chr6:46138265-46138599
  hyper
  upper_gi vs. colorectal

SEQ ID NO: 480971 - DNA, 162 bp, Homo sapiens; identical to SEQ ID NO: 350376
  chr6:46138801-46138963
  hyper
  upper_gi vs. colorectal

SEQ ID NO: 480972 - DNA, 194 bp, Homo sapiens; identical to SEQ ID NO: 456076
  chr6:50808438-50808632
  hyper
  upper_gi vs. colorectal

SEQ ID NO: 480973 - DNA, 120 bp, Homo sapiens
  chr6:53212372-53212492
  hyper
  upper_gi vs. pancreas_gallbladder,lung,renal, head_and_neck,bladder_and_urothelial,liver_bileduct,cervical, ovary,breast,anorectal,prostate,multiple_myeloma,sarcoma, uterine,non_cancer,myeloid_neoplasm,colorectal,
  CONT. FROM ABOVE: lymphoid_neoplasm,thyroid,melanoma
cgtacaattctatgaagcacttcctgccacgggtcccgctatttaaaacaaattaggctgctcgctccccacaaatcccatctagcacctctcggttcctcagtctagctaataaaccat

SEQ ID NO: 480974 - DNA, 216 bp, Homo sapiens
  chr6:53213970-53214186
  hyper
  upper_gi vs. cervical,head_and_neck,liver_bileduct, pancreas_gallbladder,lung,bladder_and_urothelial,prostate, breast,anorectal,melanoma,renal,uterine,multiple_myeloma, lymphoid_neoplasm,ovary,sarcoma,non_cancer,myeloid_neoplasm,
  CONT. FROM ABOVE: thyroid,colorectal
tttttttcccctttcttcctaataagcctgcgtggaacgcagagcctgcgcaatagccccggtgaagttgtcgatgccctgaactctggtttttttactgccaggcgtggcaggagtctgtggccgcatttgggtggcagaagcccaccctcgttacggtctcctctatgagttatgtcatgctgaaggggatccacttcatcgttaaagctgaaa

SEQ ID NO: 480975 - DNA, 249 bp, Homo sapiens; identical to SEQ ID NO: 456079
  chr6:56818408-56818657
  hyper
  upper_gi vs. cervical,anorectal,renal

SEQ ID NO: 480976 - DNA, 208 bp, Homo sapiens; identical to SEQ ID NO: 453384
  chr6:69344116-69344324
  hyper
  upper_gi vs. lung

SEQ ID NO: 480977 - DNA, 295 bp, Homo sapiens; identical to SEQ ID NO: 453385
  chr6:69344649-69344944
  hyper
  upper_gi vs. lung

SEQ ID NO: 480978 - DNA, 295 bp, Homo sapiens; identical to SEQ ID NO: 453385
  chr6:69344649-69344944
  hyper
  upper_gi vs. lung,melanoma

SEQ ID NO: 480979 - DNA, 72 bp, Homo sapiens; identical to SEQ ID NO: 350392
  chr6:69346042-69346114
  hyper
  upper_gi vs. lung,colorectal

SEQ ID NO: 480980 - DNA, 575 bp, Homo sapiens
  chr6:70576385-70576960
  hyper
  upper_gi vs. liver_bileduct,lymphoid_neoplasm,lung, bladder_and_urothelial,pancreas_gallbladder
cgcggagtgggagggtcacactgggagagactaataagggcagagatgcgtcccccttccccactcgcagggagctcactcctcggcggtgccgcagccctgtccggactccactgcgcctctgaggggctcaaatacgaattcaaggtaagctgcgcggctttgcgaccggctctgcacttgccctctcacacatgcccgggctatgtcatctgctcgtgttcctagttatctgtgtgcatctgcttttcaagaaaatgtaaaaactgtgctacacatggaaatatgtttaggtggataaataatgcacacctgcatacgtttccataggggccttaaggatgggaccaaaaacgtttggcaggagacggccactctcatgtggtacataccatgtagttcgtgttcctatgttcacatgatgcaggcttcatgcgttacacctaagttctaggtggtttttctggctatgtgtgtctgtgaagcggaactatggagcactgctgatgcgggtagggacagacatcaaatacattacaaaaaaaatggggggttaaaggagtaaaacaaactca

SEQ ID NO: 480981 - DNA, 258 bp, Homo sapiens
  chr6:70576997-70577255
  hyper
  upper_gi vs. liver_bileduct,lymphoid_neoplasm,lung, bladder_and_urothelial,pancreas_gallbladder
tttttgacggtgttagccctggaagcgaggcagccagttaagcggcgtaagctaagagacgcggggttccggtgcggtgccctccggcccggggttacctactccacatgtgggtgtttttcccaagtgcggcttctggggggcggcgcgggcgcgggcggggattcccggactccagccccaccacgttccggagcgtccggccctgttccttaattaccctgcagcatgcgcagcgcggtcggccacagcgccgcc

SEQ ID NO: 480982 - DNA, 174 bp, Homo sapiens
  chr6:70576786-70576960
  hyper
  upper_gi vs. liver_bileduct,bladder_and_urothelial, lymphoid_neoplasm,lung,melanoma,anorectal,uterine, pancreas_gallbladder,breast,head_and_neck,multiple_myeloma, prostate,sarcoma
cgtgttcctatgttcacatgatgcaggcttcatgcgttacacctaagttctaggtggtttttctggctatgtgtgtctgtgaagcggaactatggagcactgctgatgcgggtagggacagacatcaaatacattacaaaaaaaatggggggttaaaggagtaaaacaaactca

SEQ ID NO: 480983 - DNA, 299 bp, Homo sapiens
  chr6:70576997-70577296
  hyper
  upper_gi vs. liver_bileduct,bladder_and_urothelial, lymphoid_neoplasm,lung,melanoma,anorectal,uterine, pancreas_gallbladder,breast,head_and_neck,multiple_myeloma, prostate,sarcoma
tttttgacggtgttagccctggaagcgaggcagccagttaagcggcgtaagctaagagacgcggggttccggtgcggtgccctccggcccggggttacctactccacatgtgggtgtttttcccaagtgcggcttctggggggcggcgcgggcgcgggcggggattcccggactccagccccaccacgttccggagcgtccggccctgttccttaattaccctgcagcatgcgcagcgcggtcggccacagcgccgccgccgtccccgcagtcctccctgcagccaccgccgccgccgc

SEQ ID NO: 480984 - DNA, 55 bp, Homo sapiens; identical to SEQ ID NO: 458205
  chr6:71665452-71665507
  hyper
  upper_gi vs. pancreas_gallbladder,lung,liver_bileduct, head_and_neck,ovary,bladder_and_urothelial

SEQ ID NO: 480985 - DNA, 223 bp, Homo sapiens; identical to SEQ ID NO: 458206
  chr6:71665723-71665946
  hyper
  upper_gi vs. pancreas_gallbladder,lung,liver_bileduct, head_and_neck,ovary,bladder_and_urothelial

SEQ ID NO: 480986 - DNA, 227 bp, Homo sapiens; identical to SEQ ID NO: 453389
  chr6:72596315-72596542
  hyper
  upper_gi vs. lung

SEQ ID NO: 480987 - DNA, 9 bp, Homo sapiens
  chr6:73333099-73333108
  hyper
  upper_gi vs. head_and_neck,lung,breast,anorectal,thyroid, lymphoid_neoplasm,multiple_myeloma,prostate
ttgtggcgc

SEQ ID NO: 480988 - DNA, 83 bp, Homo sapiens; identical to SEQ ID NO: 350409
  chr6:80657600-80657683
  hyper
  upper_gi vs. anorectal,sarcoma,melanoma, bladder_and_urothelial,breast,head_and_neck,thyroid

SEQ ID NO: 480989 - DNA, 3 bp, Homo sapiens
  chr6:90120874-90120877
  hyper
  upper_gi vs. lung,pancreas_gallbladder,liver_bileduct, cervical,melanoma
cgc

SEQ ID NO: 480990 - DNA, 305 bp, Homo sapiens
  chr6:90121293-90121598
  hyper
  upper_gi vs. lung,pancreas_gallbladder,liver_bileduct, cervical,melanoma
cagaagcgcgcgctcctccagcccagacgcttactccctccttccccttttccaccgatcctggttgcccctccgccaccagcaccgcgctccctcatttggcagctcgaggtcgggcttttggcgtccctccccaccccaaaccctcaactggacccgctcccctggaccccctccaagtcggtggctcgcgcacggccgggctgggggcgggaaggcgccaaggggaggaaaggggcgcgagccgaggacgcgggggccgggcgctcacctccctcctctgtgccgctgtccggatcggcgtc

SEQ ID NO: 480991 - DNA, 305 bp, Homo sapiens; identical to SEQ ID NO: 480990
  chr6:90121293-90121598
  hyper
  upper_gi vs. pancreas_gallbladder,lung,cervical, liver_bileduct,melanoma,head_and_neck,ovary,anorectal

SEQ ID NO: 480992 - DNA, 500 bp, Homo sapiens
  chr6:90121684-90122184
  hyper
  upper_gi vs. pancreas_gallbladder,lung,cervical, liver_bileduct,melanoma,head_and_neck,ovary,anorectal
gctgcggcttccccagcacctggctcatcgtgcccaccggccggccggcccggggacggcgggggtcccggggtgggggccaagcctcctagccggccgcccgcagcctatttctgaagcggaggtttgtctagagctcagcggggcccggcggaagcgggggccgcgcgtcccccggcgggcggcgcccaggtccgggtcccgcggttcccagcgcgcccgaagccccctcccccgccccgcccgccggcggaggagtcagccggagcgcggcagttcctcccggaggagggagagagagagagactgcgtgacccgagtcacctgacacacactgtcacatactcacatacacaccccgcacgggcgcgcgcgcgctcgcccggccgcgggcaccactcggcggggcgctgggccgaggacacacatgcacacgcacacgcacacgcacgaggagaccggggaggcgcggggcccctgcaccctcccagactcacacc

SEQ ID NO: 480993 - DNA, 706 bp, Homo sapiens
  chr6:90121688-90122394
  hyper
  upper_gi vs. pancreas_gallbladder,liver_bileduct,lung, head_and_neck,cervical
cggcttccccagcacctggctcatcgtgcccaccggccggccggcccggggacggcgggggtcccggggtgggggccaagcctcctagccggccgcccgcagcctatttctgaagcggaggtttgtctagagctcagcggggcccggcggaagcgggggccgcgcgtcccccggcgggcggcgcccaggtccgggtcccgcggttcccagcgcgcccgaagccccctcccccgccccgcccgccggcggaggagtcagccggagcgcggcagttcctcccggaggagggagagagagagagactgcgtgacccgagtcacctgacacacactgtcacatactcacatacacaccccgcacgggcgcgcgcgcgctcgcccggccgcgggcaccactcggcggggcgctgggccgaggacacacatgcacacgcacacgcacacgcacgaggagaccggggaggcgcggggcccctgcaccctcccagactcacaccgacacacgccccgtacacggggcccccgggacgccggccgtcacccaccgcggctgcgcgccaggggcccccacgcgcctctccttcacgtggtccccgcacaggcaggggagggggcgccgcacaccctcaatgtcccccccgccgtcccactcccacacgcccgcagagcgtctaccgtgggcggatgcctcctgcttacagtcctga

SEQ ID NO: 480994 - DNA, 74 bp, Homo sapiens; identical to SEQ ID NO: 345243
  chr6:90122423-90122497
  hyper
  upper_gi vs. pancreas_gallbladder,liver_bileduct,lung, head_and_neck,cervical

SEQ ID NO: 480995 - DNA, 256 bp, Homo sapiens; identical to SEQ ID NO: 459784
  chr6:90142647-90142903
  hyper
  upper_gi vs. pancreas_gallbladder,liver_bileduct,lung

SEQ ID NO: 480996 - DNA, 372 bp, Homo sapiens; identical to SEQ ID NO: 346840
  chr6:91005702-91006074
  hyper
  upper_gi vs. head_and_neck,cervical,anorectal,prostate, lymphoid_neoplasm,uterine,liver_bileduct,non_cancer, bladder_and_urothelial,thyroid,multiple_myeloma,ovary,lung

SEQ ID NO: 480997 - DNA, 874 bp, Homo sapiens
  chr6:91005702-91006576
  hyper
  upper_gi vs. liver_bileduct,lymphoid_neoplasm
gagggttaaggaggaggccgcccggcctggagctgggatcgcaggctgggggccgggacacccgggcctcgccgggccgggggcagggccgcgggtctgacagctgctgcggctcgcgcggacgcgcgcctcctgcagcccgccctccccatgcctgacttattactctctgctcctcctccctctgctgttccaaaacacccttcgacgccagcaaaatacaatgcgcctcggccgccgtaaacagccgggagggagagcacacattcggcgcggcgcggccgccggctcggctcccacccccttcccgttcctagaaaatgccataaaagcgggcagggcgcggggagggcggctgcgcgcccggcggccggggctcccttcccgcgccgtttccccacgcctccccgcccgccccgcgcgcccgctccccccgcaaacttgccccgccaccccgcccagcggcggggcccggggcccggggcccgggactcacctcgccggagaactttgcgtccttttccgcctcctcttccccgcgtcttcccggctcgcagccccctcccggcagccggcgaggtgggcagttcgtgggtcaccgaaagctcgcggaggggacgcgcatcacatggcagctcgttcccagccccccgagtgcgccgggaagggggaggggaaggggcgaggggaggccggggggaaagcgagagcggggcggcggcgggagtgggcaggcggggtggcgagggcggcggccgctcacgttagcgctgtgcgaccgcagcccgggcgtgcacggccgctgctgccgctgctgctgctgctgctgctgctgaggcggcggcggctcggcgctgtttgctccgcgccgcgc

SEQ ID NO: 480998 - DNA, 667 bp, Homo sapiens
  chr6:91006087-91006754
  hyper
  upper_gi vs. pancreas_gallbladder
cgcgccgtttccccacgcctccccgcccgccccgcgcgcccgctccccccgcaaacttgccccgccaccccgcccagcggcggggcccggggcccggggcccgggactcacctcgccggagaactttgcgtccttttccgcctcctcttccccgcgtcttcccggctcgcagccccctcccggcagccggcgaggtgggcagttcgtgggtcaccgaaagctcgcggaggggacgcgcatcacatggcagctcgttcccagccccccgagtgcgccgggaagggggaggggaaggggcgaggggaggccggggggaaagcgagagcggggcggcggcgggagtgggcaggcggggtggcgagggcggcggccgctcacgttagcgctgtgcgaccgcagcccgggcgtgcacggccgctgctgccgctgctgctgctgctgctgctgctgaggcggcggcggctcggcgctgtttgctccgcgccgcgcggcttgcgctctccccggaacgcccacactctcaatcgctacattgttgacattcggcgctgacgtcacccgctccccattcacaataactttacgggagccgggcagcgcacctccccggccgctggggcgcggtacgcccggcgactagcgtaagccgctccgcgaatggcgctcc

SEQ ID NO: 480999 - DNA, 97 bp, Homo sapiens; identical to SEQ ID NO: 358602
  chr6:91006779-91006876
  hyper
  upper_gi vs. pancreas_gallbladder

SEQ ID NO: 481000 - DNA, 42 bp, Homo sapiens; identical to SEQ ID NO: 459786
  chr6:91320244-91320286
  hyper
  upper_gi vs. bladder_and_urothelial,sarcoma

SEQ ID NO: 481001 - DNA, 222 bp, Homo sapiens; identical to SEQ ID NO: 371312
  chr6:124125086-124125308
  hyper
  upper_gi vs. lung

SEQ ID NO: 481002 - DNA, 59 bp, Homo sapiens
  chr6:126068722-126068781
  hyper
  upper_gi vs. head_and_neck
cgtttggacgcgcccgctaattgcccgtgtggcaaacatgagttgcacctgcaggcatt

SEQ ID NO: 481003 - DNA, 155 bp, Homo sapiens; identical to SEQ ID NO: 345250
  chr6:126069942-126070097
  hyper
  upper_gi vs. head_and_neck

SEQ ID NO: 481004 - DNA, 440 bp, Homo sapiens; identical to SEQ ID NO: 453397
  chr6:127836226-127836666
  hyper
  upper_gi vs. lung

SEQ ID NO: 481005 - DNA, 225 bp, Homo sapiens; identical to SEQ ID NO: 453398
  chr6:127836441-127836666
  hyper
  upper_gi vs. lung

SEQ ID NO: 481006 - DNA, 31 bp, Homo sapiens; identical to SEQ ID NO: 350458
  chr6:127837749-127837780
  hyper
  upper_gi vs. lung

SEQ ID NO: 481007 - DNA, 69 bp, Homo sapiens; identical to SEQ ID NO: 358678
  chr6:151562596-151562665
  hyper
  upper_gi vs. pancreas_gallbladder,cervical

SEQ ID NO: 481008 - DNA, 182 bp, Homo sapiens; identical to SEQ ID NO: 464739
  chr6:152622733-152622915
  hyper
  upper_gi vs. liver_bileduct

SEQ ID NO: 481009 - DNA, 16 bp, Homo sapiens
  chr6:152623493-152623509
  hyper
  upper_gi vs. liver_bileduct
ggaatcatgaacttcc

SEQ ID NO: 481010 - DNA, 42 bp, Homo sapiens; identical to SEQ ID NO: 371360
  chr6:153452827-153452869
  hyper
  upper_gi vs. anorectal,colorectal,bladder_and_urothelial

SEQ ID NO: 481011 - DNA, 229 bp, Homo sapiens; identical to SEQ ID NO: 459793
  chr6:159589682-159589911
  hyper
  upper_gi vs. myeloid_neoplasm

SEQ ID NO: 481012 - DNA, 41 bp, Homo sapiens; identical to SEQ ID NO: 346866
  chr6:159591277-159591318
  hyper
  upper_gi vs. sarcoma,prostate,myeloid_neoplasm,thyroid, renal

SEQ ID NO: 481013 - DNA, 109 bp, Homo sapiens; identical to SEQ ID NO: 459798
  chr6:163834157-163834266
  hyper
  upper_gi vs. pancreas_gallbladder

SEQ ID NO: 481014 - DNA, 29 bp, Homo sapiens
  chr6:163834829-163834858
  hyper
  upper_gi vs. pancreas_gallbladder
acctccgccccgcagccaagacccgcgcc

SEQ ID NO: 481015 - DNA, 29 bp, Homo sapiens
  chr6:163834829-163834858
  hyper
  upper_gi vs. liver_bileduct
acctccgccccgcagccaagacccgcgcc

SEQ ID NO: 481016 - DNA, 97 bp, Homo sapiens; identical to SEQ ID NO: 459801
  chr6:163834987-163835084
  hyper
  upper_gi vs. liver_bileduct

SEQ ID NO: 481017 - DNA, 340 bp, Homo sapiens; identical to SEQ ID NO: 459802
  chr6:163835131-163835471
  hyper
  upper_gi vs. liver_bileduct

SEQ ID NO: 481018 - DNA, 97 bp, Homo sapiens; identical to SEQ ID NO: 459801
  chr6:163834987-163835084
  hyper
  upper_gi vs. liver_bileduct,pancreas_gallbladder

SEQ ID NO: 481019 - DNA, 667 bp, Homo sapiens; identical to SEQ ID NO: 459804
  chr6:163835131-163835798
  hyper
  upper_gi vs. liver_bileduct,pancreas_gallbladder

SEQ ID NO: 481020 - DNA, 69 bp, Homo sapiens; identical to SEQ ID NO: 459805
  chr6:163835906-163835975
  hyper
  upper_gi vs. liver_bileduct,pancreas_gallbladder

SEQ ID NO: 481021 - DNA, 306 bp, Homo sapiens; identical to SEQ ID NO: 459806
  chr6:163835492-163835798
  hyper
  upper_gi vs. liver_bileduct,pancreas_gallbladder

SEQ ID NO: 481022 - DNA, 292 bp, Homo sapiens; identical to SEQ ID NO: 459807
  chr6:163835906-163836198
  hyper
  upper_gi vs. liver_bileduct,pancreas_gallbladder

SEQ ID NO: 481023 - DNA, 221 bp, Homo sapiens; identical to SEQ ID NO: 459808
  chr6:163835977-163836198
  hyper
  upper_gi vs. pancreas_gallbladder,liver_bileduct

SEQ ID NO: 481024 - DNA, 205 bp, Homo sapiens; identical to SEQ ID NO: 459809
  chr6:163837231-163837436
  hyper
  upper_gi vs. liver_bileduct,pancreas_gallbladder

SEQ ID NO: 481025 - DNA, 239 bp, Homo sapiens; identical to SEQ ID NO: 459810
  chr6:163837231-163837470
  hyper
  upper_gi vs. liver_bileduct

SEQ ID NO: 481026 - DNA, 14 bp, Homo sapiens
  chr6:163837780-163837794
  hyper
  upper_gi vs. liver_bileduct
cagcactcaccaac

SEQ ID NO: 481027 - DNA, 12 bp, Homo sapiens
  chr7:1703861-1703873
  hyper
  upper_gi vs. anorectal
cgggctcggccc

SEQ ID NO: 481028 - DNA, 95 bp, Homo sapiens; identical to SEQ ID NO: 346873
  chr7:1705153-1705248
  hyper
  upper_gi vs. melanoma

SEQ ID NO: 481029 - DNA, 234 bp, Homo sapiens; identical to SEQ ID NO: 474310
  chr7:1705153-1705387
  hyper
  upper_gi vs. melanoma,lung,sarcoma,breast

SEQ ID NO: 481030 - DNA, 60 bp, Homo sapiens; identical to SEQ ID NO: 474311
  chr7:1705693-1705753
  hyper
  upper_gi vs. melanoma,lung,sarcoma,breast

SEQ ID NO: 481031 - DNA, 121 bp, Homo sapiens; identical to SEQ ID NO: 459812
  chr7:1705266-1705387
  hyper
  upper_gi vs. sarcoma,head_and_neck, bladder_and_urothelial

SEQ ID NO: 481032 - DNA, 503 bp, Homo sapiens; identical to SEQ ID NO: 459813
  chr7:1705693-1706196
  hyper
  upper_gi vs. sarcoma,head_and_neck, bladder_and_urothelial

SEQ ID NO: 481033 - DNA, 435 bp, Homo sapiens
  chr7:1705761-1706196
  hyper
cgcccgcgacagtgcctccagcccggggcccgcaccccggcccaggtaagaaggggcctgaggggcagggggctgtccggggccgggggacccctctgtcgccgctgcgggatcggagggtccccgcccctaggggaggcagggaagaggatgctctctggggggggcggcggggggcagcgcagggtccccagcggctctcgcagcccgggccaccccatccctggtgccctgacctcggcgtccgcgccagggccgagtctccccgcccgcggggctctggatgcggcgctcggggcccgcggctcccgggcgtccccatccacccacccaggttcggaggcgggcgcacccgaagttagcggccgccgagcctgggccggacaaacttccctccccgacgccgcggctggaagggccaggactccggacccc

SEQ ID NO: 481034 - DNA, 20 bp, Homo sapiens
  chr7:1706733-1706753
  hyper
cattttccctcttcgatctc

SEQ ID NO: 481035 - DNA, 63 bp, Homo sapiens
  chr7:6655356-6655419
  hyper
  upper_gi vs. lung,anorectal
cggcccaggccgcccgcaggctccgggcacctgtagcccccgaggacccgcgtcgcctggccg

SEQ ID NO: 481036 - DNA, 221 bp, Homo sapiens
  chr7:6655448-6655669
  hyper
  upper_gi vs. lung,anorectal
gtgccgaccccgggcgccggcctggatcccgctgcccgcgatggtcccggggggccggccctgagccccgcgcgggattcggggccctgcctcccgccccagcccccgccggagagtctccaccaacttctgctcggccgctcctctcagccccttcccttggcccagggcgacctcggcagcccagagggcgtggaccctccggagtgcccagaaagccc

SEQ ID NO: 481037 - DNA, 153 bp, Homo sapiens; identical to SEQ ID NO: 358745
  chr7:6655854-6656007
  hyper
  upper_gi vs. lung,anorectal

SEQ ID NO: 481038 - DNA, 77 bp, Homo sapiens; identical to SEQ ID NO: 458241
  chr7:19146849-19146926
  hyper
  upper_gi vs. myeloid_neoplasm

SEQ ID NO: 481039 - DNA, 60 bp, Homo sapiens; identical to SEQ ID NO: 454474
  chr7:19156644-19156704
  hyper
  upper_gi vs. melanoma,prostate,anorectal,sarcoma,uterine, head_and_neck,myeloid_neoplasm,breast,ovary,multiple_myeloma, cervical,thyroid,non_cancer

SEQ ID NO: 481040 - DNA, 60 bp, Homo sapiens; identical to SEQ ID NO: 454474
  chr7:19156644-19156704
  hyper
  upper_gi vs. anorectal,uterine,breast,head_and_neck, sarcoma,prostate,myeloid_neoplasm,non_cancer,thyroid

SEQ ID NO: 481041 - DNA, 86 bp, Homo sapiens
  chr7:20817295-20817381
  hyper
  upper_gi vs. colorectal
cgctgcactttgacgtcgctggggagaggaggcgggtgcgagtgaacacaaagcagtttggccaagaaaagagcacaggaggtgaa

SEQ ID NO: 481042 - DNA, 128 bp, Homo sapiens
  chr7:20817410-20817538
  hyper
  upper_gi vs. colorectal
agagaaagctgaacaagttcaggaagaagaatctgagtctgtccacgccgcagcagcctccggtggcacgggcagaaagatcaagcgcggcaccccgtgacaggatgggacagattccccgggctccg

SEQ ID NO: 481043 - DNA, 120 bp, Homo sapiens; identical to SEQ ID NO: 467629
  chr7:20825260-20825380
  hyper
  upper_gi vs. colorectal

SEQ ID NO: 481044 - DNA, 120 bp, Homo sapiens; identical to SEQ ID NO: 467629
  chr7:20825260-20825380
  hyper
  upper_gi vs. colorectal

SEQ ID NO: 481045 - DNA, 460 bp, Homo sapiens; identical to SEQ ID NO: 371460
  chr7:20825559-20826019
  hyper
  upper_gi vs. colorectal

SEQ ID NO: 481046 - DNA, 42 bp, Homo sapiens; identical to SEQ ID NO: 464747
  chr7:20830567-20830609
  hyper
  upper_gi vs. colorectal

SEQ ID NO: 481047 - DNA, 50 bp, Homo sapiens; identical to SEQ ID NO: 459820
  chr7:21582471-21582521
  hyper
  upper_gi vs. cervical,lung

SEQ ID NO: 481048 - DNA, 176 bp, Homo sapiens; identical to SEQ ID NO: 371468
  chr7:21583452-21583628
  hyper
  upper_gi vs. head_and_neck,cervical

SEQ ID NO: 481049 - DNA, 210 bp, Homo sapiens; identical to SEQ ID NO: 456111
  chr7:23052818-23053028
  hyper
  upper_gi vs. lung,bladder_and_urothelial, lymphoid_neoplasm,melanoma,liver_bileduct,head_and_neck,ovary, anorectal,renal,multiple_myeloma

SEQ ID NO: 481050 - DNA, 595 bp, Homo sapiens; identical to SEQ ID NO: 346883
  chr7:23053080-23053675
  hyper
  upper_gi vs. lung,bladder_and_urothelial, lymphoid_neoplasm,melanoma,liver_bileduct,head_and_neck,ovary, anorectal,renal,multiple_myeloma

SEQ ID NO: 481051 - DNA, 599 bp, Homo sapiens; identical to SEQ ID NO: 456113
  chr7:23053195-23053794
  hyper
  upper_gi vs. liver_bileduct,lymphoid_neoplasm,lung, pancreas_gallbladder,bladder_and_urothelial,melanoma

SEQ ID NO: 481052 - DNA, 246 bp, Homo sapiens; identical to SEQ ID NO: 350530
  chr7:23053819-23054065
  hyper
  upper_gi vs. liver_bileduct,lymphoid_neoplasm,lung, pancreas_gallbladder,bladder_and_urothelial,melanoma

SEQ ID NO: 481053 - DNA, 107 bp, Homo sapiens; identical to SEQ ID NO: 346884
  chr7:23287654-23287761
  hyper
  upper_gi vs. melanoma

SEQ ID NO: 481054 - DNA, 868 bp, Homo sapiens; identical to SEQ ID NO: 333067
  chr7:24613119-24613987
  hyper
  upper_gi vs. liver_bileduct

SEQ ID NO: 481055 - DNA, 196 bp, Homo sapiens; identical to SEQ ID NO: 456123
  chr7:25896938-25897134
  hyper
  upper_gi vs. colorectal,anorectal

SEQ ID NO: 481056 - DNA, 109 bp, Homo sapiens; identical to SEQ ID NO: 345266
  chr7:25897246-25897355
  hyper
  upper_gi vs. colorectal,anorectal

SEQ ID NO: 481057 - DNA, 21 bp, Homo sapiens
  chr7:27196839-27196860
  hyper
  upper_gi vs. colorectal
tgtggttcgaataaagtcaac

SEQ ID NO: 481058 - DNA, 104 bp, Homo sapiens; identical to SEQ ID NO: 454482
  chr7:27204281-27204385
  hyper
  upper_gi vs. anorectal

SEQ ID NO: 481059 - DNA, 22 bp, Homo sapiens
  chr7:27206083-27206105
  hyper
  upper_gi vs. colorectal
gtccccggccctcgaccccacg

SEQ ID NO: 481060 - DNA, 78 bp, Homo sapiens; identical to SEQ ID NO: 456132
  chr7:27281871-27281949
  hyper
  upper_gi vs. colorectal

SEQ ID NO: 481061 - DNA, 372 bp, Homo sapiens; identical to SEQ ID NO: 459824
  chr7:28450240-28450612
  hyper

SEQ ID NO: 481062 - DNA, 7 bp, Homo sapiens
  chr7:37487365-37487372
  hyper
  upper_gi vs. ovary,lymphoid_neoplasm,uterine,thyroid, myeloid_neoplasm,non_cancer,multiple_myeloma,breast,prostate, sarcoma,renal,liver_bileduct,melanoma,lung
cgctcgc

SEQ ID NO: 481063 - DNA, 168 bp, Homo sapiens; identical to SEQ ID NO: 345273
  chr7:37960958-37961126
  hyper
  upper_gi vs. pancreas_gallbladder,liver_bileduct,lung, renal

SEQ ID NO: 481064 - DNA, 81 bp, Homo sapiens
  chr7:42276904-42276985
  hyper
  upper_gi vs. cervical,head_and_neck,breast,lung, bladder_and_urothelial,ovary,renal,uterine
cacaagccctgagtgacagttctgatttggttcaaccgcgggagggaggggaaagagaaagaaagaaacccccagccgtac

SEQ ID NO: 481065 - DNA, 409 bp, Homo sapiens
  chr7:42276904-42277313
  hyper
  upper_gi vs. cervical,head_and_neck,lung,breast,renal, bladder_and_urothelial
cacaagccctgagtgacagttctgatttggttcaaccgcgggagggaggggaaagagaaagaaagaaacccccagccgtacgcctctcctggcatccaatcgactttctggaaaaaggtcccatcccggcctggtgccccgtgctgggtggagaagccccccgccccgacctggcaccgcctgcactactcacggggtggaaaagttgtccctcggctccgcgctcccctcccgcgcgctccctccttcccttctctcctcctcttcctcctcctccccgcgctcctcctcccccaagttttaacagatgttgccggactctcctcgctccctcgcactctctcttcctccgccccggcccccgcccagtcccttttctttcagccactctcgggctcggaggggacgc

SEQ ID NO: 481066 - DNA, 309 bp, Homo sapiens
  chr7:42277004-42277313
  hyper
  upper_gi vs. anorectal,head_and_neck
cgactttctggaaaaaggtcccatcccggcctggtgccccgtgctgggtggagaagccccccgccccgacctggcaccgcctgcactactcacggggtggaaaagttgtccctcggctccgcgctcccctcccgcgcgctccctccttcccttctctcctcctcttcctcctcctccccgcgctcctcctcccccaagttttaacagatgttgccggactctcctcgctccctcgcactctctcttcctccgccccggcccccgcccagtcccttttctttcagccactctcgggctcggaggggacgc

SEQ ID NO: 481067 - DNA, 61 bp, Homo sapiens
  chr7:42277588-42277649
  hyper
  upper_gi vs. anorectal,head_and_neck
cgccgccgccgccgcctcctcctcctcctcctccttctcctcctcctcctcctcctccgcc

SEQ ID NO: 481068 - DNA, 39 bp, Homo sapiens; identical to SEQ ID NO: 459830
  chr7:44364447-44364486
  hyper
  upper_gi vs. anorectal,breast,uterine,prostate, head_and_neck,ovary,bladder_and_urothelial,sarcoma

SEQ ID NO: 481069 - DNA, 27 bp, Homo sapiens
  chr7:44365258-44365285
  hyper
  upper_gi vs. anorectal,breast,uterine,prostate, head_and_neck,ovary,bladder_and_urothelial,sarcoma
caccgccgccgccgccgcgcccgcccc

SEQ ID NO: 481070 - DNA, 369 bp, Homo sapiens; identical to SEQ ID NO: 346904
  chr7:44365258-44365627
  hyper
  upper_gi vs. breast,anorectal,ovary,prostate, head_and_neck,bladder_and_urothelial,sarcoma,uterine

SEQ ID NO: 481071 - DNA, 1 bp, Homo sapiens
  chr7:45613422-45613423
  hyper
  upper_gi vs. bladder_and_urothelial,sarcoma,lung,uterine, prostate,thyroid,multiple_myeloma,breast,anorectal,non_cancer, myeloid_neoplasm
c

SEQ ID NO: 481072 - DNA, 102 bp, Homo sapiens; identical to SEQ ID NO: 345274
  chr7:50344738-50344840
  hyper
  upper_gi vs. anorectal,multiple_myeloma, lymphoid_neoplasm,non_cancer,myeloid_neoplasm,head_and_neck, uterine,thyroid,ovary,cervical,breast,lung

SEQ ID NO: 481073 - DNA, 65 bp, Homo sapiens; identical to SEQ ID NO: 333144
  chr7:63767198-63767263
  hyper
  upper_gi vs. pancreas_gallbladder,bladder_and_urothelial

SEQ ID NO: 481074 - DNA, 2 bp, Homo sapiens
  chr7:64713004-64713006
  hyper
  upper_gi vs. pancreas_gallbladder
tc

SEQ ID NO: 481075 - DNA, 5 bp, Homo sapiens
  chr7:64974264-64974269
  hyper
  upper_gi vs. melanoma,breast,uterine,prostate,sarcoma, liver_bileduct,non_cancer,multiple_myeloma,myeloid_neoplasm, ovary,thyroid,lung,lymphoid_neoplasm,renal, bladder_and_urothelial
cggcg

SEQ ID NO: 481076 - DNA, 61 bp, Homo sapiens; identical to SEQ ID NO: 458263
  chr7:64974448-64974509
  hyper
  upper_gi vs. melanoma,breast,uterine,prostate,sarcoma, liver_bileduct,non_cancer,multiple_myeloma,myeloid_neoplasm, ovary,thyroid,lung,lymphoid_neoplasm,renal, bladder_and_urothelial

SEQ ID NO: 481077 - DNA, 5 bp, Homo sapiens
  chr7:64974988-64974993
  hyper
  upper_gi vs. melanoma,breast,uterine,prostate,sarcoma, liver_bileduct,non_cancer,multiple_myeloma,myeloid_neoplasm, ovary,thyroid,lung,lymphoid_neoplasm,renal, bladder_and_urothelial
tcggc

SEQ ID NO: 481078 - DNA, 157 bp, Homo sapiens
  chr7:69062203-69062360
  hyper
  upper_gi vs. anorectal,lung,breast,head_and_neck, cervical,ovary,renal,prostate,uterine,bladder_and_urothelial, myeloid_neoplasm,thyroid
cgcacagctattttacccagagaggctggtcgcttttgttgatcgattctcggctgcagtcagctctttaatacaactttttatgagcatcagccacattgcggcgggaggaggggctgtggtggaaaaagcagggaaaccgccccccactcccaaa

SEQ ID NO: 481079 - DNA, 422 bp, Homo sapiens; identical to SEQ ID NO: 459840
  chr7:69063038-69063460
  hyper
  upper_gi vs. anorectal,lung,ovary,head_and_neck,cervical, breast,bladder_and_urothelial,prostate,renal,uterine, myeloid_neoplasm,multiple_myeloma

SEQ ID NO: 481080 - DNA, 420 bp, Homo sapiens
  chr7:69063040-69063460
  hyper
  upper_gi vs. lung,head_and_neck,bladder_and_urothelial, breast,cervical,uterine,sarcoma,prostate
cgcccccgcccccgcccccctcacagctccccaccgcccccagtgcgcaggcccggccgccccagcgcgcatgccctgggctcgcgagcgcggccagcccccagccttttgctttctacacactctacaactggggagggggcgggggaggagggagcccagccgtccacgtgatcccgccggccggggccgcgggggcgggagcgcgcgccgagagaggcgcggggagggcgggtgcgcgggagcgcgcgcactcgagcgagcgagcgaaagcacgaacgagcgagcgagcgagcgagcgagcgggcgggcgcggggttgggctgaggcgggcggcggcggcggcggcggcggtgggctggccgcggagggggaggagcgggagctgcgcgaggcaggcgggcgggcggaggatggggc

SEQ ID NO: 481081 - DNA, 319 bp, Homo sapiens
  chr7:69063552-69063871
  hyper
  upper_gi vs. lung,head_and_neck,bladder_and_urothelial, breast,cervical,uterine,sarcoma,prostate
cgttagcggcggcggcgagagcagcgttcccggctgcgcttctccctcaggcggggcggcgagagaagcggcggcggcggcggcggcacaccggtgtctctcccgctggagatttctttctgctttcctcatcgactgactgactcaccccctcccttttttgaggaagggtgacctcttctctgggactggaaaaaatatttttgtgaggaggggggcgggtggcagcgacagggtttgcttcttctcttctttcatctccctctcctcccccctcgaagaccgaaaagcaaaccccacaactgctccagcagcatcc

SEQ ID NO: 481082 - DNA, 98 bp, Homo sapiens
  chr7:69063900-69063998
  hyper
  upper_gi vs. lung,head_and_neck,bladder_and_urothelial, breast,cervical,uterine,sarcoma,prostate
ccgccgctcgcagtttcgccctctcttccgctaatgattgcattattatgctcccctctctggggggtctcgcccctcttgggtcgctccggagcccc

SEQ ID NO: 481083 - DNA, 319 bp, Homo sapiens; identical to SEQ ID NO: 481081
  chr7:69063552-69063871
  hyper
  upper_gi vs. head_and_neck,breast,cervical,lung,sarcoma, renal,prostate,uterine,bladder_and_urothelial

SEQ ID NO: 481084 - DNA, 283 bp, Homo sapiens
  chr7:69063900-69064183
  hyper
  upper_gi vs. head_and_neck,breast,cervical,lung,sarcoma, renal,prostate,uterine,bladder_and_urothelial
ccgccgctcgcagtttcgccctctcttccgctaatgattgcattattatgctcccctctctggggggtctcgcccctcttgggtcgctccggagccccggcctcccctggctgcatttcttaaaaatttgggagcctgggagtgagttttctccgaggcgtgtgtgagaggcggcgggggtgttttcctgcgcgaggggcgggtgaagttcattgcccccacttttcccgcgacctttttcggacccgattttggatcgagttgaggggggcgcgggcgtttt

SEQ ID NO: 481085 - DNA, 130 bp, Homo sapiens; identical to SEQ ID NO: 459841
  chr7:69064053-69064183
  hyper
  upper_gi vs. lung,renal,breast,cervical,prostate,ovary, uterine,bladder_and_urothelial,sarcoma,myeloid_neoplasm, head_and_neck,melanoma,thyroid

SEQ ID NO: 481086 - DNA, 200 bp, Homo sapiens; identical to SEQ ID NO: 350591
  chr7:69065161-69065361
  hyper
  upper_gi vs. cervical,ovary,breast,prostate,renal,lung, anorectal,uterine,sarcoma,bladder_and_urothelial

SEQ ID NO: 481087 - DNA, 1 bp, Homo sapiens
  chr7:87257895-87257896
  hyper
  upper_gi vs. liver_bileduct,colorectal,renal, bladder_and_urothelial,lung,ovary,breast,uterine, myeloid_neoplasm
c

SEQ ID NO: 481088 - DNA, 45 bp, Homo sapiens; identical to SEQ ID NO: 346914
  chr7:87258398-87258443
  hyper
  upper_gi vs. liver_bileduct,colorectal,lung,breast,renal, uterine

SEQ ID NO: 481089 - DNA, 168 bp, Homo sapiens; identical to SEQ ID NO: 458266
  chr7:87563203-87563371
  hyper
  upper_gi vs. colorectal,pancreas_gallbladder, lymphoid_neoplasm

SEQ ID NO: 481090 - DNA, 216 bp, Homo sapiens; identical to SEQ ID NO: 458267
  chr7:87563614-87563830
  hyper
  upper_gi vs. colorectal,pancreas_gallbladder, lymphoid_neoplasm

SEQ ID NO: 481091 - DNA, 176 bp, Homo sapiens; identical to SEQ ID NO: 458268
  chr7:87563890-87564066
  hyper
  upper_gi vs. colorectal,pancreas_gallbladder, lymphoid_neoplasm

SEQ ID NO: 481092 - DNA, 637 bp, Homo sapiens
  chr7:90225109-90225746
  hyper
  upper_gi vs. pancreas_gallbladder
cgtggaaggagaaaaccgctcaaacaactggactcggcccgtttcctttcggtaacctccccacagcccaacacgctgtccccagacgctgcccgctcccaccccggtcccttcgtgatcctcccgcgcgcgggcggggcgggggaggagcgcgggggcggccgggaggggcgcggccgggagggggcgccgccggggcgcgagccagacacagagggccgcggaggacgcgggaggcgagcggggagccgaggtcgtgctaggatcccgcgcccaggggccttcgtcgagggaggggcgtggcggcggcagcaggagggcagcaggagctgtcaggctggcggttccgcgccgcggctccttctgcgctgcgcccgcaactctgggctgagaacttctcccgccggcccactcgccctcgccccgcgcactcggcgccaggcgactcccgcaccttgtacccggcccgccccgcctcctccttcggccgcaccactccccctgccggccgcgcttctctccgttacaaaggagggaaaatgagccgggcggcggcggcgcggcgcggggccaccacggcggcggcgagcgcggccgcccccggcaccacgtaaaccgcccccgcccgcccagctgc

SEQ ID NO: 481093 - DNA, 296 bp, Homo sapiens; identical to SEQ ID NO: 459844
  chr7:90225450-90225746
  hyper
  upper_gi vs. pancreas_gallbladder,liver_bileduct, cervical

SEQ ID NO: 481094 - DNA, 212 bp, Homo sapiens; identical to SEQ ID NO: 459845
  chr7:90226057-90226269
  hyper
  upper_gi vs. pancreas_gallbladder,liver_bileduct, cervical

SEQ ID NO: 481095 - DNA, 212 bp, Homo sapiens; identical to SEQ ID NO: 459845
  chr7:90226057-90226269
  hyper
  upper_gi vs. pancreas_gallbladder,cervical, liver_bileduct

SEQ ID NO: 481096 - DNA, 473 bp, Homo sapiens; identical to SEQ ID NO: 472590
  chr7:95025593-95026066
  hyper
  upper_gi vs. liver_bileduct

SEQ ID NO: 481097 - DNA, 80 bp, Homo sapiens; identical to SEQ ID NO: 456135
  chr7:99155672-99155752
  hyper
  upper_gi vs. liver_bileduct,lymphoid_neoplasm,melanoma, anorectal,cervical,head_and_neck,sarcoma,pancreas_gallbladder, multiple_myeloma,bladder_and_urothelial,renal,non_cancer, thyroid

SEQ ID NO: 481098 - DNA, 15 bp, Homo sapiens
  chr7:99156600-99156615
  hyper
  upper_gi vs. liver_bileduct,lymphoid_neoplasm,melanoma, anorectal,cervical,head_and_neck,sarcoma,pancreas_gallbladder, multiple_myeloma,bladder_and_urothelial,renal,non_cancer, thyroid
ccgccgtcaggagcc

SEQ ID NO: 481099 - DNA, 216 bp, Homo sapiens; identical to SEQ ID NO: 456137
  chr7:99156600-99156816
  hyper
  upper_gi vs. melanoma,liver_bileduct,anorectal, pancreas_gallbladder,lymphoid_neoplasm,head_and_neck,sarcoma, cervical,renal,non_cancer,multiple_myeloma, bladder_and_urothelial,thyroid

SEQ ID NO: 481100 - DNA, 77 bp, Homo sapiens; identical to SEQ ID NO: 345277
  chr7:99156982-99157059
  hyper
  upper_gi vs. melanoma,liver_bileduct,anorectal, pancreas_gallbladder,lymphoid_neoplasm,head_and_neck,sarcoma, cervical,renal,non_cancer,multiple_myeloma, bladder_and_urothelial,thyroid

SEQ ID NO: 481101 - DNA, 20 bp, Homo sapiens
  chr7:106684813-106684833
  hyper
  upper_gi vs. lung,bladder_and_urothelial,melanoma,breast, ovary,renal,uterine,prostate
cgggggttcaccatggcgaa

SEQ ID NO: 481102 - DNA, 252 bp, Homo sapiens; identical to SEQ ID NO: 463034
  chr7:106684920-106685172
  hyper
  upper_gi vs. lung,bladder_and_urothelial,melanoma,breast, ovary,renal,uterine,prostate

SEQ ID NO: 481103 - DNA, 221 bp, Homo sapiens; identical to SEQ ID NO: 346927
  chr7:106685920-106686141
  hyper
  upper_gi vs. bladder_and_urothelial,lung,melanoma,breast, renal,ovary,prostate,uterine

SEQ ID NO: 481104 - DNA, 153 bp, Homo sapiens
  chr7:113724594-113724747
  hyper
  upper_gi vs. colorectal
cggtgtgtttaccgacgtgggtgccagggctgcttcctccctgggagagccgcgggttctgaaggaaagggttggtgccaagtgtgtgtgtgagctcgcgactgccctttagagaaagggcgcgctgctctttcaggaaaggaaagattcaaa

SEQ ID NO: 481105 - DNA, 230 bp, Homo sapiens; identical to SEQ ID NO: 458278
  chr7:113725472-113725702
  hyper
  upper_gi vs. colorectal,head_and_neck

SEQ ID NO: 481106 - DNA, 68 bp, Homo sapiens; identical to SEQ ID NO: 346929
  chr7:113725858-113725926
  hyper
  upper_gi vs. colorectal,head_and_neck

SEQ ID NO: 481107 - DNA, 230 bp, Homo sapiens; identical to SEQ ID NO: 458278
  chr7:113725472-113725702
  hyper
  upper_gi vs. colorectal

SEQ ID NO: 481108 - DNA, 230 bp, Homo sapiens; identical to SEQ ID NO: 458281
  chr7:113725858-113726088
  hyper
  upper_gi vs. colorectal

SEQ ID NO: 481109 - DNA, 134 bp, Homo sapiens
  chr7:113725954-113726088
  hyper
  upper_gi vs. colorectal,head_and_neck
cgtcagccaggaggctccgctgcaaatccgaacaatattcttccccgcgtttccccctccttaaagaagttagggaacggggggagataggtggacgggggagaaaggcatcctaaccagctggttccaaacct

SEQ ID NO: 481110 - DNA, 408 bp, Homo sapiens; identical to SEQ ID NO: 467694
  chr7:113726962-113727370
  hyper
  upper_gi vs. anorectal

SEQ ID NO: 481111 - DNA, 55 bp, Homo sapiens
  chr7:124404307-124404362
  hyper
cgtgctgtttccccggcggggacccccaggctcatggattccttcacccaaggat

SEQ ID NO: 481112 - DNA, 52 bp, Homo sapiens; identical to SEQ ID NO: 464784
  chr7:126891155-126891207
  hyper
  upper_gi vs. colorectal,multiple_myeloma,cervical, thyroid,non_cancer,anorectal

SEQ ID NO: 481113 - DNA, 205 bp, Homo sapiens
  chr7:126893238-126893443
  hyper
  upper_gi vs. cervical,colorectal
gccctggcgcgggcagggagggggaccctcggcccgcggatccccctccgctcttcagcctgaagcgacgaggagaccagaaatgtcaatagttctgatttttaaaaatcatccccccttccccgcccccaagaaaaaggggaggacccaactacagagtgagagggtgggaagaagcgggagcggtagaagaaggaatatggtt

SEQ ID NO: 481114 - DNA, 205 bp, Homo sapiens; identical to SEQ ID NO: 481113
  chr7:126893238-126893443
  hyper
  upper_gi vs. colorectal

SEQ ID NO: 481115 - DNA, 459 bp, Homo sapiens
  chr7:126893489-126893948
  hyper
  upper_gi vs. colorectal
cgcggggaggcgcgacgcccgcccgagcacagcgggcagcacccgcgagcccgggtccccggtgaacacagctccagaaagcgtcaccgagaataacacatggtagatgacaagtgtcccgccacatgctttcttttcgggaatgcttaaagtagagccggcaagccgcgcggttcccttgcaaagtttgcctggcgccgcgcggcggttccgccatttgtcccgccccgcggctctggcgattgtctccccactccccgcccccgagggtctgagggacgcgtgcaacagagtccccagggctcgaggtaccacacagcgcggtccgctgcgggcactgcgcaggaaggggcatgggtggctaccgggacggtcattttattgagatgattcaaggagccgcagacgcggggcaggaaactccgggggagccgtgctcgggttctgcagggaaacctc

SEQ ID NO: 481116 - DNA, 588 bp, Homo sapiens
  chr7:126893489-126894077
  hyper
  upper_gi vs. pancreas_gallbladder
cgcggggaggcgcgacgcccgcccgagcacagcgggcagcacccgcgagcccgggtccccggtgaacacagctccagaaagcgtcaccgagaataacacatggtagatgacaagtgtcccgccacatgctttcttttcgggaatgcttaaagtagagccggcaagccgcgcggttcccttgcaaagtttgcctggcgccgcgcggcggttccgccatttgtcccgccccgcggctctggcgattgtctccccactccccgcccccgagggtctgagggacgcgtgcaacagagtccccagggctcgaggtaccacacagcgcggtccgctgcgggcactgcgcaggaaggggcatgggtggctaccgggacggtcattttattgagatgattcaaggagccgcagacgcggggcaggaaactccgggggagccgtgctcgggttctgcagggaaacctcgggattcccttcgcatgccgcatgcggaaacctgccgggctcgacgtgcacagtccagcgctcctccccactagttactgcccaggccccccgatcctgcacccgccggaatgagagaaagtagcccct

SEQ ID NO: 481117 - DNA, 65 bp, Homo sapiens; identical to SEQ ID NO: 358950
  chr7:126894197-126894262
  hyper
  upper_gi vs. pancreas_gallbladder

SEQ ID NO: 481118 - DNA, 265 bp, Homo sapiens
  chr7:128828640-128828905
  hyper
  upper_gi vs. cervical
gcggggcggggaggtggctttaatggtgggagagggaatggggctggggattgggggcccaggggtctcctagggctgaagacaacttggattgcgaggctagggcttggggagtcgtgcatcccgttccgggcctccgcagcccaacatgggccccgggttccaaagtttgcgaagttgggcgccgaggggccggggcgcgcggagcgtccgggggggcccgggcccggattctctgggcgcacaggtcgcctgagccgcctcc

SEQ ID NO: 481119 - DNA, 3 bp, Homo sapiens
  chr7:149570366-149570369
  hyper
  upper_gi vs. liver_bileduct,pancreas_gallbladder, colorectal,lung
cgc

SEQ ID NO: 481120 - DNA, 740 bp, Homo sapiens
  chr7:149570406-149571146
  hyper
  upper_gi vs. liver_bileduct,pancreas_gallbladder, colorectal,lung
tcccgccgggtccctgaacgccggcccggccggtccaacctcattccgcttcccgccatcgaaacgcgaagcccccgccttcccccaaacgtctcagcgccgctggggcctttctggctgcgccgcctccgaccccaggccccggtccgcgcccgccgctcgctagtcctgggagtgaggagaacgcgtgctgaggacccggccagagggacagcggggaccgccctcccgctgcgtctctgaaagcgaggccgttcctcccgcgtccgacccccgcggggccgtcaggttcggggcggcccaggctgcgggtccgcagggcgcttcgggccgagccggcgcggcgcgtgaagggcaggggacgccccgaaagaccgctggggtgggaccccaagctccaggggtctttggaaataagaatgcggcgtgacgttggctgtgcgggcgcggggctgacgcggaccctataacccatcgccgaaaccgggcggccgcgcccctattcctcggcatttctctctgtccgcggccctgctcagccaatcagcgagtgggctcctaggcaggtcctgagtgacagcgcggcgggctggatcaggagatgcgcgtgcgcggcccggcccggctgatcgcttcgggtgctcgactcctgttgcgcatgctcagcgcgctgcccggctggggacccgcgcacctgcagcgcccgctgctcggccctgcatcctgcctgggcatcctgc

SEQ ID NO: 481121 - DNA, 777 bp, Homo sapiens; identical to SEQ ID NO: 346941
  chr7:149570652-149571429
  hyper
  upper_gi vs. liver_bileduct,pancreas_gallbladder, colorectal

SEQ ID NO: 481122 - DNA, 89 bp, Homo sapiens
  chr7:149745487-149745576
  hyper
  upper_gi vs. liver_bileduct
cggagagggcacggggtcgcacaaaaagggtgcgagggtgcgtgaagagggtggaggggcggggaccacgcgggtcgtgggtgcggggg

SEQ ID NO: 481123 - DNA, 43 bp, Homo sapiens; identical to SEQ ID NO: 467720
  chr8:495481-495524
  hyper
  upper_gi vs. liver_bileduct

SEQ ID NO: 481124 - DNA, 69 bp, Homo sapiens; identical to SEQ ID NO: 467721
  chr8:495635-495704
  hyper
  upper_gi vs. liver_bileduct

SEQ ID NO: 481125 - DNA, 18 bp, Homo sapiens
  chr8:496001-496019
  hyper
  upper_gi vs. liver_bileduct
ggacggagccgcgggaac

SEQ ID NO: 481126 - DNA, 203 bp, Homo sapiens
  chr8:6691849-6692052
  hyper
  upper_gi vs. pancreas_gallbladder
cgcggggtccgggctcaggcagcccttagcgcccaggctgggtccggctgtcaccaccccgagcgtcctgcggcagcctcccttgcacgaaaagccttcggtgctgcagggctggggaatgctgacacccagtccgtgcccagctggagggcaagggaggacacctggggtgggtgccgacccccgcaggtcctgtctcagcc

SEQ ID NO: 481127 - DNA, 152 bp, Homo sapiens; identical to SEQ ID NO: 346962
  chr8:6692462-6692614
  hyper
  upper_gi vs. pancreas_gallbladder

SEQ ID NO: 481128 - DNA, 225 bp, Homo sapiens
  chr8:6692462-6692687
  hyper
  upper_gi vs. pancreas_gallbladder,cervical
ctccccccgccaccccttctgcgagcggcctccaagtcgcagggtccccctggacggccgggggtcgggggagagcccgggcgcccccagacttgcgctcagcacatcttggcatcgcagcactttgcaaagcttgtgatggaaggaagggcggatacatctcccctgcttctgcgaggggatcttgcatgcgtggggcggggggatcgtgcatgggcgggagga

SEQ ID NO: 481129 - DNA, 51 bp, Homo sapiens
  chr8:6692636-6692687
  hyper
  upper_gi vs. pancreas_gallbladder
cgaggggatcttgcatgcgtggggcggggggatcgtgcatgggcgggagga

SEQ ID NO: 481130 - DNA, 209 bp, Homo sapiens; identical to SEQ ID NO: 350704
  chr8:6693170-6693379
  hyper
  upper_gi vs. pancreas_gallbladder

SEQ ID NO: 481131 - DNA, 106 bp, Homo sapiens; identical to SEQ ID NO: 350705
  chr8:8639980-8640086
  hyper
  upper_gi vs. head_and_neck,liver_bileduct, lymphoid_neoplasm

SEQ ID NO: 481132 - DNA, 304 bp, Homo sapiens
  chr8:10873138-10873442
  hyper
  upper_gi vs. multiple_myeloma,pancreas_gallbladder,ovary, bladder_and_urothelial,uterine,renal,lymphoid_neoplasm
cggggctggctgcgttcgggacccagcgccccccaggccctccaaagactggttgagctcagaaccagaaggagcgagggagcagagaaagccgggggcgggctcggggtaagacaggaagggagtgagattaaggtgagaagtgggaggggaaggagggaaaccgagaggaattgagggtgggctcggcgtatctagagcagtccgcggaggacgctgaggctcgccggggaagtgctgtgcccgaggcgccccaaaggtgggcggcggtgccagctcagacccacgcctctgtccaagtccc

SEQ ID NO: 481133 - DNA, 241 bp, Homo sapiens
  chr8:10873649-10873890
  hyper
  upper_gi vs. multiple_myeloma,pancreas_gallbladder,ovary, bladder_and_urothelial,uterine,renal,lymphoid_neoplasm
gggtgcagctcccctggcacagcccgacggtgggagagggcggccagctggactaaaagccccgtccccgggcgggaccttcctccccgcaccctgacgcggaggttggccgggggcctctgcgtccctctgccccgcgccctggatggggagggtctgggctccgcgccgcgaggcagcgcgacggctgcgggcgacttggcgtgcggtgctgaggaccctgggggagtgtgcgccgcgg

SEQ ID NO: 481134 - DNA, 241 bp, Homo sapiens; identical to SEQ ID NO: 481133
  chr8:10873649-10873890
  hyper
  upper_gi vs. bladder_and_urothelial,anorectal,renal, pancreas_gallbladder,prostate,multiple_myeloma, lymphoid_neoplasm,ovary,uterine

SEQ ID NO: 481135 - DNA, 259 bp, Homo sapiens
  chr8:10874042-10874301
  hyper
  upper_gi vs. bladder_and_urothelial,anorectal,renal, pancreas_gallbladder,prostate,multiple_myeloma, lymphoid_neoplasm,ovary,uterine
catccctgcctggctgccacccggaagtccccgtccgcgccccgacagcgccgccctccggctggctgcagcgcgggccctcggtagggggcgttccaaggccccgcctcctcgtcactgccacggatgacgacgccccaggcccccggccccgcctccgcctctgcctccgcggccagcactggggagcgtcctggcctgcgcttgctccccaacccctccttgccccgctctgagccggcgcgtccttgctccccca

SEQ ID NO: 481136 - DNA, 377 bp, Homo sapiens
  chr8:11058799-11059176
  hyper
  upper_gi vs. pancreas_gallbladder
gctgagcgaagcccacccccacgccaccgccatcggatttcgccgccatcttgactctcttcccagctccggaggttgggggggagggacggcggggggggggggaagaaggcagggaacggggagggggggaaacgaatggagaggaaggggggcggggaggaagcgggggagcaaacgaacgaggggggagtgggccagggaaccccctccgcttccgggtagttggcgtcacttccgggcgagccccccaatcgcacggcgcccgcagctccccagccctaccctcccggccaagatggccgccctcctgtgcctcagctgctgggcgggggaccggggggttctccccgccagggctccccttcccctcttcc

SEQ ID NO: 481137 - DNA, 158 bp, Homo sapiens; identical to SEQ ID NO: 350709
  chr8:11059210-11059368
  hyper
  upper_gi vs. pancreas_gallbladder

SEQ ID NO: 481138 - DNA, 25 bp, Homo sapiens
  chr8:38323132-38323157
  hyper
  upper_gi vs. cervical
cggcaaagacggccggcaatagcag

SEQ ID NO: 481139 - DNA, 154 bp, Homo sapiens
  chr8:38324508-38324662
  hyper
  upper_gi vs. head_and_neck,cervical,anorectal,ovary, breast,uterine,pancreas_gallbladder,renal,sarcoma,prostate,lung
cgcaaacatgggtcgtagcctcacttttctcccaaccccaaacataacggtaggggaagcgaggtgcagaggggtctgggccagagaagcatacgcatcgctgccgagtgaaccacaccggacaaaaaccctcatcccttcccccacctctagg

SEQ ID NO: 481140 - DNA, 216 bp, Homo sapiens
  chr8:38324861-38325077
  hyper
  upper_gi vs. head_and_neck,cervical,anorectal,ovary, breast,uterine,pancreas_gallbladder,renal,sarcoma,prostate,lung
acctattccaagagaagctaacctagccctccacgtcctccgcagttcatctcccaccccatccgaccccaacccgcaccccaggctttcccgggggtggaaaaggacttaggaatgccccggatttttagcgttgagcccaaagctacctgctgaattgggggtgaatccccaaaaggggaccaaaaagacatggagtggaatgcaacacacaca

SEQ ID NO: 481141 - DNA, 227 bp, Homo sapiens; identical to SEQ ID NO: 474394
  chr8:38326050-38326277
  hyper
  upper_gi vs. breast,cervical,melanoma,ovary, head_and_neck,renal,prostate,lung,uterine,sarcoma, bladder_and_urothelial,non_cancer,myeloid_neoplasm,thyroid, pancreas_gallbladder

SEQ ID NO: 481142 - DNA, 540 bp, Homo sapiens; identical to SEQ ID NO: 478788
  chr8:41685769-41686309
  hyper
  upper_gi vs. lymphoid_neoplasm

SEQ ID NO: 481143 - DNA, 1 bp, Homo sapiens
  chr8:41755217-41755218
  hyper
  upper_gi vs. thyroid
c

SEQ ID NO: 481144 - DNA, 113 bp, Homo sapiens; identical to SEQ ID NO: 458304
  chr8:49834207-49834320
  hyper
  upper_gi vs. liver_bileduct,head_and_neck

SEQ ID NO: 481145 - DNA, 128 bp, Homo sapiens; identical to SEQ ID NO: 467756
  chr8:53853387-53853515
  hyper
  upper_gi vs. anorectal

SEQ ID NO: 481146 - DNA, 11 bp, Homo sapiens
  chr8:57069543-57069554
  hyper
  upper_gi vs. myeloid_neoplasm
cgaaaagtaga

SEQ ID NO: 481147 - DNA, 24 bp, Homo sapiens
  chr8:65492354-65492378
  hyper
  upper_gi vs. anorectal,bladder_and_urothelial,melanoma, renal,lung,sarcoma,head_and_neck
cggaaagtcccatccccaaatcca

SEQ ID NO: 481148 - DNA, 261 bp, Homo sapiens; identical to SEQ ID NO: 467763
  chr8:65492407-65492668
  hyper
  upper_gi vs. anorectal,bladder_and_urothelial,melanoma, renal,lung,sarcoma,head_and_neck

SEQ ID NO: 481149 - DNA, 267 bp, Homo sapiens; identical to SEQ ID NO: 350760
  chr8:65494311-65494578
  hyper
  upper_gi vs. sarcoma,anorectal,lung,head_and_neck, bladder_and_urothelial,myeloid_neoplasm,prostate,melanoma, thyroid,breast

SEQ ID NO: 481150 - DNA, 55 bp, Homo sapiens; identical to SEQ ID NO: 346990
  chr8:72756949-72757004
  hyper
  upper_gi vs. sarcoma,renal,melanoma

SEQ ID NO: 481151 - DNA, 27 bp, Homo sapiens
  chr8:75896528-75896555
  hyper
  upper_gi vs. lung
cgggcttgggtctcgggagcccaaagc

SEQ ID NO: 481152 - DNA, 77 bp, Homo sapiens; identical to SEQ ID NO: 346991
  chr8:75897394-75897471
  hyper
  upper_gi vs. lung

SEQ ID NO: 481153 - DNA, 186 bp, Homo sapiens
  chr8:81397833-81398019
  hyper
  upper_gi vs. liver_bileduct
cggggcggtgcattttctgtgaaatgactactgtccggggcccgaggtgctgcctcgcacaatgcatcaaaggaggttgtgtccgtggtcgtaacctcttcgcgtgaaaggcaccgcctggtccagtctttgtgaaggaacaaaataagttcacttccttgggcaccgccacccaccctcagcaaa

SEQ ID NO: 481154 - DNA, 274 bp, Homo sapiens
  chr8:81398155-81398429
  hyper
  upper_gi vs. liver_bileduct
actcgccagctgtttgtcctccgcgtagcccggccccggccgcacacgcccgccccctccctgagacccccagcccgccgcccggccttttgtccccaacccctcggccgacttccttccccgcggccgcacccccgcccccaggccggaggcgcagcccagcccctttcccggtcccctggcgcccccaccccaccccagcccagccccaagcccagcccccctcccccagcccggcccccaccctttccccctccagcggttactgctaccc

SEQ ID NO: 481155 - DNA, 274 bp, Homo sapiens; identical to SEQ ID NO: 481154
  chr8:81398155-81398429
  hyper
  upper_gi vs. liver_bileduct,pancreas_gallbladder

SEQ ID NO: 481156 - DNA, 134 bp, Homo sapiens; identical to SEQ ID NO: 350776
  chr8:81399496-81399630
  hyper
  upper_gi vs. liver_bileduct,pancreas_gallbladder

SEQ ID NO: 481157 - DNA, 602 bp, Homo sapiens; identical to SEQ ID NO: 359154
  chr8:81399496-81400098
  hyper
  upper_gi vs. pancreas_gallbladder

SEQ ID NO: 481158 - DNA, 66 bp, Homo sapiens; identical to SEQ ID NO: 456178
  chr8:91996920-91996986
  hyper
  upper_gi vs. sarcoma,multiple_myeloma

SEQ ID NO: 481159 - DNA, 55 bp, Homo sapiens; identical to SEQ ID NO: 467778
  chr8:97156910-97156965
  hyper
  upper_gi vs. melanoma

SEQ ID NO: 481160 - DNA, 80 bp, Homo sapiens; identical to SEQ ID NO: 350793
  chr8:97507728-97507808
  hyper
  upper_gi vs. pancreas_gallbladder,renal,liver_bileduct

SEQ ID NO: 481161 - DNA, 59 bp, Homo sapiens; identical to SEQ ID NO: 350796
  chr8:99953137-99953196
  hyper
  upper_gi vs. colorectal,pancreas_gallbladder, myeloid_neoplasm,renal,thyroid,non_cancer,multiple_myeloma

SEQ ID NO: 481162 - DNA, 398 bp, Homo sapiens; identical to SEQ ID NO: 463071
  chr8:104511554-104511952
  hyper
  upper_gi vs. head_and_neck,uterine,breast,ovary

SEQ ID NO: 481163 - DNA, 430 bp, Homo sapiens; identical to SEQ ID NO: 463072
  chr8:104511554-104511984
  hyper
  upper_gi vs. head_and_neck,bladder_and_urothelial,ovary, uterine,thyroid,anorectal

SEQ ID NO: 481164 - DNA, 18 bp, Homo sapiens
  chr8:104511966-104511984
  hyper
  upper_gi vs. head_and_neck,sarcoma,melanoma, bladder_and_urothelial,anorectal,thyroid,cervical
cgctcagtctctcctccc

SEQ ID NO: 481165 - DNA, 38 bp, Homo sapiens; identical to SEQ ID NO: 467787
  chr8:105600489-105600527
  hyper
  upper_gi vs. colorectal,cervical

SEQ ID NO: 481166 - DNA, 330 bp, Homo sapiens; identical to SEQ ID NO: 467788
  chr8:105600681-105601011
  hyper
  upper_gi vs. colorectal,cervical

SEQ ID NO: 481167 - DNA, 153 bp, Homo sapiens; identical to SEQ ID NO: 467789
  chr8:105600858-105601011
  hyper
  upper_gi vs. colorectal

SEQ ID NO: 481168 - DNA, 148 bp, Homo sapiens; identical to SEQ ID NO: 350811
  chr8:105601687-105601835
  hyper
  upper_gi vs. colorectal

SEQ ID NO: 481169 - DNA, 226 bp, Homo sapiens; identical to SEQ ID NO: 474420
  chr8:109799189-109799415
  hyper
  upper_gi vs. anorectal,uterine,ovary,lung,head_and_neck

SEQ ID NO: 481170 - DNA, 42 bp, Homo sapiens; identical to SEQ ID NO: 350816
  chr8:109799903-109799945
  hyper
  upper_gi vs. anorectal,uterine,ovary,lung,head_and_neck

SEQ ID NO: 481171 - DNA, 100 bp, Homo sapiens; identical to SEQ ID NO: 453479
  chr8:110986113-110986213
  hyper
  upper_gi vs. colorectal,renal

SEQ ID NO: 481172 - DNA, 174 bp, Homo sapiens; identical to SEQ ID NO: 350818
  chr8:110987222-110987396
  hyper
  upper_gi vs. colorectal

SEQ ID NO: 481173 - DNA, 541 bp, Homo sapiens; identical to SEQ ID NO: 454513
  chr8:121823361-121823902
  hyper
  upper_gi vs. liver_bileduct

SEQ ID NO: 481174 - DNA, 27 bp, Homo sapiens
  chr8:121823930-121823957
  hyper
  upper_gi vs. liver_bileduct
ctcgctgctcagaaccagggcgtcctc

SEQ ID NO: 481175 - DNA, 106 bp, Homo sapiens; identical to SEQ ID NO: 475895
  chr8:131455079-131455185
  hyper
  upper_gi vs. pancreas_gallbladder,liver_bileduct

SEQ ID NO: 481176 - DNA, 72 bp, Homo sapiens; identical to SEQ ID NO: 350829
  chr8:131456212-131456284
  hyper
  upper_gi vs. liver_bileduct,pancreas_gallbladder, cervical

SEQ ID NO: 481177 - DNA, 189 bp, Homo sapiens
  chr8:133491923-133492112
  hyper
  upper_gi vs. melanoma
cgcacccctcccatccccaactaaactcagtggcgatcccaacagaagggatccacccgaaacagaaacacagagctcacgggaggacccgctttatcctcttcaaccctcacattaattggaaaaacccacataattattttaagcttccaaaccaacacccctagaagatgtcataaatgtgcaccc

SEQ ID NO: 481178 - DNA, 65 bp, Homo sapiens; identical to SEQ ID NO: 372006
  chr8:133492127-133492192
  hyper
  upper_gi vs. melanoma

SEQ ID NO: 481179 - DNA, 12 bp, Homo sapiens
  chr8:133492249-133492261
  hyper
  upper_gi vs. renal,uterine,thyroid,lung,ovary,non_cancer, myeloid_neoplasm
cgcgtgctgagg

SEQ ID NO: 481180 - DNA, 311 bp, Homo sapiens; identical to SEQ ID NO: 474427
  chr8:133493185-133493496
  hyper
  upper_gi vs. renal,lung,uterine,melanoma,thyroid, non_cancer,ovary

SEQ ID NO: 481181 - DNA, 311 bp, Homo sapiens; identical to SEQ ID NO: 474427
  chr8:133493185-133493496
  hyper
  upper_gi vs. colorectal

SEQ ID NO: 481182 - DNA, 1 bp, Homo sapiens
  chr8:133493782-133493783
  hyper
  upper_gi vs. colorectal
c

SEQ ID NO: 481183 - DNA, 938 bp, Homo sapiens; identical to SEQ ID NO: 459880
  chr8:134582236-134583174
  hyper
  upper_gi vs. pancreas_gallbladder

SEQ ID NO: 481184 - DNA, 436 bp, Homo sapiens; identical to SEQ ID NO: 459881
  chr8:134582738-134583174
  hyper
  upper_gi vs. pancreas_gallbladder

SEQ ID NO: 481185 - DNA, 438 bp, Homo sapiens; identical to SEQ ID NO: 459882
  chr8:134583293-134583731
  hyper
  upper_gi vs. pancreas_gallbladder

SEQ ID NO: 481186 - DNA, 926 bp, Homo sapiens; identical to SEQ ID NO: 359232
  chr8:134583293-134584219
  hyper
  upper_gi vs. pancreas_gallbladder

SEQ ID NO: 481187 - DNA, 64 bp, Homo sapiens; identical to SEQ ID NO: 359243
  chr8:143531771-143531835
  hyper
  upper_gi vs. melanoma

SEQ ID NO: 481188 - DNA, 93 bp, Homo sapiens
  chr9:214559-214652
  hyper
  upper_gi vs. pancreas_gallbladder
cgacttgcctacattccctggcagcctcgcagcttcgggcagatggagcttccggcctgcgcgcagtggtcgcctgtcgtccgcccgcgctcc

SEQ ID NO: 481189 - DNA, 169 bp, Homo sapiens; identical to SEQ ID NO: 359262
  chr9:215348-215517
  hyper
  upper_gi vs. pancreas_gallbladder

SEQ ID NO: 481190 - DNA, 29 bp, Homo sapiens
  chr9:841339-841368
  hyper
  upper_gi vs. melanoma
cggctctggtcttgacctggggagcccag

SEQ ID NO: 481191 - DNA, 114 bp, Homo sapiens; identical to SEQ ID NO: 453490
  chr9:6644756-6644870
  hyper
  upper_gi vs. renal

SEQ ID NO: 481192 - DNA, 38 bp, Homo sapiens
  chr9:8857406-8857444
  hyper
  upper_gi vs. colorectal
cgggtctgaggtttcaggcgagaagtgaacccagcagg

SEQ ID NO: 481193 - DNA, 2 bp, Homo sapiens
  chr9:8858690-8858692
  hyper
  upper_gi vs. colorectal
cc

SEQ ID NO: 481194 - DNA, 22 bp, Homo sapiens
  chr9:36036762-36036784
  hyper
  upper_gi vs. melanoma,renal,lung,prostate,ovary,sarcoma, multiple_myeloma,uterine,non_cancer
cgacacacagttgggccataac

SEQ ID NO: 481195 - DNA, 9 bp, Homo sapiens
  chr9:37028066-37028075
  hyper
  upper_gi vs. lymphoid_neoplasm,melanoma,prostate, non_cancer
agagcagtc

SEQ ID NO: 481196 - DNA, 63 bp, Homo sapiens; identical to SEQ ID NO: 456188
  chr9:37034135-37034198
  hyper
  upper_gi vs. colorectal,lymphoid_neoplasm

SEQ ID NO: 481197 - DNA, 3 bp, Homo sapiens
  chr9:66494093-66494096
  hyper
  upper_gi vs. bladder_and_urothelial,lymphoid_neoplasm, breast,multiple_myeloma
cgc

SEQ ID NO: 481198 - DNA, 150 bp, Homo sapiens
  chr9:74061513-74061663
  hyper
  upper_gi vs. melanoma
cgcgtgcgaagggagaaaagaaagcaaagactggggctctcccccggccactcaccggcgtctgctgcgacgggagtcccgagcgtttggtggacccctgcttggaacttaaccttttccacgactcggcaaacctgccccggctggcgc

SEQ ID NO: 481199 - DNA, 102 bp, Homo sapiens; identical to SEQ ID NO: 458342
  chr9:77111662-77111764
  hyper
  upper_gi vs. ovary,anorectal,lung,sarcoma,head_and_neck, bladder_and_urothelial,renal,prostate,multiple_myeloma

SEQ ID NO: 481200 - DNA, 9 bp, Homo sapiens
  chr9:77112369-77112378
  hyper
  upper_gi vs. ovary,anorectal,lung,sarcoma,head_and_neck, bladder_and_urothelial,renal,prostate,multiple_myeloma
atccacacc

SEQ ID NO: 481201 - DNA, 15 bp, Homo sapiens
  chr9:99984044-99984059
  hyper
  upper_gi vs. melanoma,sarcoma,ovary
ctggccgtgactccc

SEQ ID NO: 481202 - DNA, 41 bp, Homo sapiens; identical to SEQ ID NO: 359367
  chr9:99984107-99984148
  hyper
  upper_gi vs. melanoma,sarcoma,ovary

SEQ ID NO: 481203 - DNA, 240 bp, Homo sapiens
  chr9:100000500-100000740
  hyper
  upper_gi vs. lung,cervical
agaacgtgttggcccgggcctccataaccatggctgctaggggcggggactgggagcgcgggtcccgggactgggagcgcgggtcccaggccagggtgcgggctgggaagactcggtcctccactgccccagcaggccacgcgcccgcgcgtagcctcccgccccgctagcagcacgctgcgtggctgctcgttggctacttacgacggaagctcggttggggtttctgcagaagtttcc

SEQ ID NO: 481204 - DNA, 17 bp, Homo sapiens
  chr9:100001094-100001111
  hyper
  upper_gi vs. lung,cervical
attctcagtctcctcgc

SEQ ID NO: 481205 - DNA, 5 bp, Homo sapiens
  chr9:101470603-101470608
  hyper
  upper_gi vs. pancreas_gallbladder
cgggg

SEQ ID NO: 481206 - DNA, 69 bp, Homo sapiens
  chr9:108418403-108418472
  hyper
  upper_gi vs. liver_bileduct
cggaagccagggcgcggagagtggggaggaaacggtgggagtccccgtcgggaaggggcccccgggccc

SEQ ID NO: 481207 - DNA, 171 bp, Homo sapiens; identical to SEQ ID NO: 372189
  chr9:108418947-108419118
  hyper
  upper_gi vs. liver_bileduct

SEQ ID NO: 481208 - DNA, 60 bp, Homo sapiens
  chr9:112402440-112402500
  hyper
  upper_gi vs. cervical
cgggaacacgcagaatttggagtgaaacggaaaggggcatggggtcgccaaggtggtgaa

SEQ ID NO: 481209 - DNA, 52 bp, Homo sapiens
  chr9:126773180-126773232
  hyper
  upper_gi vs. cervical
cgaaccctggcctttctgagttcctaaagccatgctcgcccccactcttcca

SEQ ID NO: 481210 - DNA, 61 bp, Homo sapiens
  chr9:126773978-126774039
  hyper
  upper_gi vs. cervical
tcctcctcttttttctcctcctccacctcctcctccgcctcctcctcctcctcttcctcct

SEQ ID NO: 481211 - DNA, 61 bp, Homo sapiens; identical to SEQ ID NO: 481210
  chr9:126773978-126774039
  hyper
  upper_gi vs. cervical,colorectal

SEQ ID NO: 481212 - DNA, 113 bp, Homo sapiens
  chr9:132804293-132804406
  hyper
  upper_gi vs. bladder_and_urothelial,lung, pancreas_gallbladder,breast,ovary,liver_bileduct,renal,melanoma, lymphoid_neoplasm,prostate,anorectal,cervical,colorectal, uterine,head_and_neck,non_cancer,myeloid_neoplasm,thyroid,
  CONT. FROM ABOVE: sarcoma
cgggccgccgcactgcccatcccctgcccagtgatttccccaggaatccggggacggcaggaaaagagctccatccacagccagcccctcgcctttccggggacggccctcag

SEQ ID NO: 481213 - DNA, 208 bp, Homo sapiens
  chr9:132804455-132804663
  hyper
  upper_gi vs. bladder_and_urothelial,lung, pancreas_gallbladder,breast,ovary,liver_bileduct,renal,melanoma, lymphoid_neoplasm,prostate,anorectal,cervical,colorectal, uterine,head_and_neck,non_cancer,myeloid_neoplasm,thyroid,
  CONT. FROM ABOVE: sarcoma
gcaaggcgcccctcaccgccaactttccccactggaaactattctccgagcaaccgttaaagatcattgaccccgcgaacgcctcttcctgaggtagatcacgtaagatctctccctaactcccactttcccctccagaccagacgtcgcagtgcccacatcccactcaggattgagctaccccgaaagaacaagtgcgcccggagcc

SEQ ID NO: 481214 - DNA, 104 bp, Homo sapiens
  chr9:132804693-132804797
  hyper
  upper_gi vs. bladder_and_urothelial,lung, pancreas_gallbladder,breast,ovary,liver_bileduct,renal,melanoma, lymphoid_neoplasm,prostate,anorectal,cervical,colorectal, uterine,head_and_neck,non_cancer,myeloid_neoplasm,thyroid,
  CONT. FROM ABOVE: sarcoma
cgaagaccgcactctcgccccagcaccccaaaacccgacccccggcgctcgccccggccgccccgctcccggggaagtgcccgatccgccagcgcctccgcgga

SEQ ID NO: 481215 - DNA, 6 bp, Homo sapiens
  chr9:132804974-132804980
  hyper
  upper_gi vs. bladder_and_urothelial,lung, pancreas_gallbladder,breast,ovary,liver_bileduct,renal,melanoma, lymphoid_neoplasm,prostate,anorectal,cervical,colorectal, uterine,head_and_neck,non_cancer,myeloid_neoplasm,thyroid,
  CONT. FROM ABOVE: sarcoma
ccgccc

SEQ ID NO: 481216 - DNA, 90 bp, Homo sapiens
  chr9:132805028-132805118
  hyper
  upper_gi vs. bladder_and_urothelial,lung, pancreas_gallbladder,breast,ovary,liver_bileduct,renal,melanoma, lymphoid_neoplasm,prostate,anorectal,cervical,colorectal, uterine,head_and_neck,non_cancer,myeloid_neoplasm,thyroid,
  CONT. FROM ABOVE: sarcoma
cgaaggacaagccggcccgcacctcctgctcgggccaaggcggacgaggggcattggaaccccgcctcctccccaggccgcgaggacccc

SEQ ID NO: 481217 - DNA, 25 bp, Homo sapiens
  chr9:132804638-132804663
  hyper
  upper_gi vs. lung,cervical,liver_bileduct,head_and_neck, pancreas_gallbladder,bladder_and_urothelial,breast,ovary,renal, lymphoid_neoplasm,melanoma,anorectal,prostate,colorectal, uterine,non_cancer,multiple_myeloma
cgaaagaacaagtgcgcccggagcc

SEQ ID NO: 481218 - DNA, 104 bp, Homo sapiens; identical to SEQ ID NO: 481214
  chr9:132804693-132804797
  hyper
  upper_gi vs. lung,cervical,liver_bileduct,head_and_neck, pancreas_gallbladder,bladder_and_urothelial,breast,ovary,renal, lymphoid_neoplasm,melanoma,anorectal,prostate,colorectal, uterine,non_cancer,multiple_myeloma

SEQ ID NO: 481219 - DNA, 6 bp, Homo sapiens
  chr9:132804974-132804980
  hyper
  upper_gi vs. lung,cervical,liver_bileduct,head_and_neck, pancreas_gallbladder,bladder_and_urothelial,breast,ovary,renal, lymphoid_neoplasm,melanoma,anorectal,prostate,colorectal, uterine,non_cancer,multiple_myeloma
ccgccc

SEQ ID NO: 481220 - DNA, 291 bp, Homo sapiens
  chr9:132805028-132805319
  hyper
  upper_gi vs. lung,cervical,liver_bileduct,head_and_neck, pancreas_gallbladder,bladder_and_urothelial,breast,ovary,renal, lymphoid_neoplasm,melanoma,anorectal,prostate,colorectal, uterine,non_cancer,multiple_myeloma
cgaaggacaagccggcccgcacctcctgctcgggccaaggcggacgaggggcattggaaccccgcctcctccccaggccgcgaggaccccgaccagcgcgccctcgcctccgcccagcagcgcggcccgcgccccctccccaggccgcggggaaacgcagcgcgcgccccgcatctgcccgcgggcccagcccctcactcacccagagctcggtgccccagctcatggtgcaggggacgcgaaggggcgctccgcgcggcgggcgcggctctctggtccccctccccggcg

SEQ ID NO: 481221 - DNA, 172 bp, Homo sapiens
  chr9:132805445-132805617
  hyper
  upper_gi vs. lung,cervical,liver_bileduct,head_and_neck, pancreas_gallbladder,bladder_and_urothelial,breast,ovary,renal, lymphoid_neoplasm,melanoma,anorectal,prostate,colorectal, uterine,non_cancer,multiple_myeloma
tggcccgaggaagcagcagccgcggccgccgcagcgcccgcccgccctacacccggagagcgggggaggggcgggaggggaggggcggggccggtctgacagctcgcgcacgcgcgcccgccccaccccggcccggccccctcccccgggctcccccggccgggtccgcgtc

SEQ ID NO: 481222 - DNA, 195 bp, Homo sapiens
  chr9:132805124-132805319
  hyper
  upper_gi vs. pancreas_gallbladder,liver_bileduct,lung, cervical,breast,bladder_and_urothelial,melanoma,head_and_neck, renal,colorectal,ovary,anorectal,prostate,uterine,sarcoma
cgcgccctcgcctccgcccagcagcgcggcccgcgccccctccccaggccgcggggaaacgcagcgcgcgccccgcatctgcccgcgggcccagcccctcactcacccagagctcggtgccccagctcatggtgcaggggacgcgaaggggcgctccgcgcggcgggcgcggctctctggtccccctccccggcg

SEQ ID NO: 481223 - DNA, 293 bp, Homo sapiens
  chr9:132805445-132805738
  hyper
  upper_gi vs. pancreas_gallbladder,liver_bileduct,lung, cervical,breast,bladder_and_urothelial,melanoma,head_and_neck, renal,colorectal,ovary,anorectal,prostate,uterine,sarcoma
tggcccgaggaagcagcagccgcggccgccgcagcgcccgcccgccctacacccggagagcgggggaggggcgggaggggaggggcggggccggtctgacagctcgcgcacgcgcgcccgccccaccccggcccggccccctcccccgggctcccccggccgggtccgcgtcgccctggggtccggaaggacgcggagggaggtgtgagggacggcgggacccggatccctaggactccccctgccaatctggtaatgacttcttagtgaccactgtctgctcgcagtactag

SEQ ID NO: 481224 - DNA, 55 bp, Homo sapiens; identical to SEQ ID NO: 201909
  chr9:132805893-132805948
  hyper
  upper_gi vs. pancreas_gallbladder,liver_bileduct,lung, cervical,breast,bladder_and_urothelial,melanoma,head_and_neck, renal,colorectal,ovary,anorectal,prostate,uterine,sarcoma

SEQ ID NO: 481225 - DNA, 307 bp, Homo sapiens
  chr9:133814911-133815218
  hyper
  upper_gi vs. pancreas_gallbladder
tcgcgcccgcggtcggaaagcccacacgacgcccccttgcccgggcggcccgtgggcgaaatgggggtccccaccactgccacagccgccggcgctgtggtcgcgagtaccagccgctccgcgctcggccgcgctcccggccgatcgcccgcgctccccggcgcgccccgcgtggtcccagcccccgccttctcctccgccgggaggggatttgtgccaggagggggcttcttagttgccccttcccaccagcagcacttttaaaagcatttaatccgcccggagcggccttcggaggtaattgaca

SEQ ID NO: 481226 - DNA, 191 bp, Homo sapiens
  chr9:133815287-133815478
  hyper
  upper_gi vs. pancreas_gallbladder
acgccgcgctcccctcccgccgccccgccgagcccgccggccgcccctcctccgcccctttctgcgtccccatctttttctgctcccccagctccagacagacccccgttccccgcccccgcttctccccaaagctgttttccggctcccggggcgccttggccgccgcgctgttccctggcaccgtctcc

SEQ ID NO: 481227 - DNA, 144 bp, Homo sapiens
  chr9:133815528-133815672
  hyper
  upper_gi vs. pancreas_gallbladder
cgatccctctacgcgtccggcactggcggggcagactggttgggggtgggggccgcgtccagcctgggctggggcactccctggaccccggagcgggggaccctgtggcccggtgccatccgaggagactgccacccgccaggc

SEQ ID NO: 481228 - DNA, 16 bp, Homo sapiens
  chr9:133815730-133815746
  hyper
  upper_gi vs. pancreas_gallbladder
cgctggcctcacctac

SEQ ID NO: 481229 - DNA, 949 bp, Homo sapiens; identical to SEQ ID NO: 454530
  chrY:16636193-16637142
  hyper
  upper_gi vs. liver_bileduct

SEQ ID NO: 481230 - DNA, 39 bp, Homo sapiens; identical to SEQ ID NO: 454548
  chr1:3659512-3659551
  hypo
  upper_gi vs. pancreas_gallbladder

SEQ ID NO: 481231 - DNA, 426 bp, Homo sapiens; identical to SEQ ID NO: 457245
  chr1:9711649-9712075
  hypo
  upper_gi vs. prostate,lymphoid_neoplasm,head_and_neck, sarcoma,multiple_myeloma,bladder_and_urothelial,non_cancer, myeloid_neoplasm,lung,uterine,thyroid,breast,cervical,ovary

SEQ ID NO: 481232 - DNA, 53 bp, Homo sapiens; identical to SEQ ID NO: 462206
  chr1:11538821-11538874
  hypo
  upper_gi vs. cervical,colorectal,melanoma,anorectal, prostate,breast,head_and_neck,ovary,uterine

SEQ ID NO: 481233 - DNA, 64 bp, Homo sapiens; identical to SEQ ID NO: 346318
  chr1:12123950-12124014
  hypo
  upper_gi vs. lymphoid_neoplasm

SEQ ID NO: 481234 - DNA, 3 bp, Homo sapiens
  chr1:14027196-14027199
  hypo
  upper_gi vs. colorectal,head_and_neck,lung,breast, anorectal,lymphoid_neoplasm,cervical,ovary,uterine,prostate, bladder_and_urothelial,non_cancer,multiple_myeloma, myeloid_neoplasm,melanoma
gcc

SEQ ID NO: 481235 - DNA, 33 bp, Homo sapiens; identical to SEQ ID NO: 454089
  chr1:25255579-25255612
  hypo
  upper_gi vs. lymphoid_neoplasm,cervical

SEQ ID NO: 481236 - DNA, 7 bp, Homo sapiens
  chr1:25255934-25255941
  hypo
  upper_gi vs. lymphoid_neoplasm,cervical
agccaga

SEQ ID NO: 481237 - DNA, 158 bp, Homo sapiens; identical to SEQ ID NO: 459263
  chr1:34629913-34630071
  hypo
  upper_gi vs. renal

SEQ ID NO: 481238 - DNA, 225 bp, Homo sapiens; identical to SEQ ID NO: 457259
  chr1:34629913-34630138
  hypo
  upper_gi vs. melanoma,sarcoma

SEQ ID NO: 481239 - DNA, 27 bp, Homo sapiens
  chr1:35394588-35394615
  hypo
  upper_gi vs. ovary,bladder_and_urothelial,breast,lung, prostate,sarcoma,lymphoid_neoplasm,uterine
cggcacacacaatcgcccacagaccca

SEQ ID NO: 481240 - DNA, 253 bp, Homo sapiens; identical to SEQ ID NO: 457261
  chr1:35394790-35395043
  hypo
  upper_gi vs. ovary,bladder_and_urothelial,breast,lung, prostate,sarcoma,lymphoid_neoplasm,uterine

SEQ ID NO: 481241 - DNA, 121 bp, Homo sapiens; identical to SEQ ID NO: 459266
  chr1:35394922-35395043
  hypo
  upper_gi vs. ovary,breast,uterine,prostate, myeloid_neoplasm,renal,non_cancer,lung,thyroid,anorectal

SEQ ID NO: 481242 - DNA, 424 bp, Homo sapiens; identical to SEQ ID NO: 470917
  chr1:38512641-38513065
  hypo
  upper_gi vs. pancreas_gallbladder

SEQ ID NO: 481243 - DNA, 106 bp, Homo sapiens; identical to SEQ ID NO: 458476
  chr1:44726788-44726894
  hypo
  upper_gi vs. liver_bileduct

SEQ ID NO: 481244 - DNA, 14 bp, Homo sapiens
  chr1:44727316-44727330
  hypo
  upper_gi vs. liver_bileduct
atgcgctccgctcc

SEQ ID NO: 481245 - DNA, 121 bp, Homo sapiens; identical to SEQ ID NO: 465917
  chr1:57110528-57110649
  hypo

SEQ ID NO: 481246 - DNA, 169 bp, Homo sapiens; identical to SEQ ID NO: 465918
  chr1:57110714-57110883
  hypo

SEQ ID NO: 481247 - DNA, 14 bp, Homo sapiens
  chr1:101005815-101005829
  hypo
  upper_gi vs. cervical,uterine,head_and_neck
ccttcgaccccagc

SEQ ID NO: 481248 - DNA, 289 bp, Homo sapiens; identical to SEQ ID NO: 452731
  chr1:101702081-101702370
  hypo
  upper_gi vs. sarcoma,uterine

SEQ ID NO: 481249 - DNA, 152 bp, Homo sapiens; identical to SEQ ID NO: 452732
  chr1:101702796-101702948
  hypo
  upper_gi vs. sarcoma,uterine

SEQ ID NO: 481250 - DNA, 393 bp, Homo sapiens; identical to SEQ ID NO: 452733
  chr1:101702796-101703189
  hypo
  upper_gi vs. sarcoma

SEQ ID NO: 481251 - DNA, 840 bp, Homo sapiens; identical to SEQ ID NO: 480192
  chr1:107599205-107600045
  hypo
  upper_gi vs. pancreas_gallbladder

SEQ ID NO: 481252 - DNA, 689 bp, Homo sapiens; identical to SEQ ID NO: 480193
  chr1:107599562-107600251
  hypo
  upper_gi vs. pancreas_gallbladder

SEQ ID NO: 481253 - DNA, 49 bp, Homo sapiens; identical to SEQ ID NO: 349294
  chr1:107684495-107684544
  hypo
  upper_gi vs. breast,prostate,head_and_neck,ovary, lymphoid_neoplasm,multiple_myeloma,bladder_and_urothelial, uterine,anorectal,myeloid_neoplasm,non_cancer,thyroid

SEQ ID NO: 481254 - DNA, 448 bp, Homo sapiens; identical to SEQ ID NO: 457286
  chr1:154297543-154297991
  hypo
  upper_gi vs. lung,lymphoid_neoplasm,multiple_myeloma, sarcoma,melanoma

SEQ ID NO: 481255 - DNA, 73 bp, Homo sapiens; identical to SEQ ID NO: 457287
  chr1:154298038-154298111
  hypo
  upper_gi vs. lung,lymphoid_neoplasm,multiple_myeloma, sarcoma,melanoma

SEQ ID NO: 481256 - DNA, 593 bp, Homo sapiens; identical to SEQ ID NO: 473578
  chr1:220701523-220702116
  hypo
  upper_gi vs. cervical,head_and_neck

SEQ ID NO: 481257 - DNA, 99 bp, Homo sapiens; identical to SEQ ID NO: 197977
  chr1:225117651-225117750
  hypo
  upper_gi vs. liver_bileduct

SEQ ID NO: 481258 - DNA, 65 bp, Homo sapiens; identical to SEQ ID NO: 466001
  chr1:225117752-225117817
  hypo
  upper_gi vs. liver_bileduct

SEQ ID NO: 481259 - DNA, 359 bp, Homo sapiens; identical to SEQ ID NO: 454601
  chr1:228528433-228528792
  hypo
  upper_gi vs. renal,anorectal,breast

SEQ ID NO: 481260 - DNA, 50 bp, Homo sapiens; identical to SEQ ID NO: 347858
  chr1:228529382-228529432
  hypo
  upper_gi vs. renal,anorectal,breast

SEQ ID NO: 481261 - DNA, 248 bp, Homo sapiens; identical to SEQ ID NO: 337370
  chr1:230346868-230347116
  hypo
  upper_gi vs. colorectal,liver_bileduct

SEQ ID NO: 481262 - DNA, 184 bp, Homo sapiens; identical to SEQ ID NO: 279411
  chr1:235813161-235813345
  hypo
  upper_gi vs. colorectal

SEQ ID NO: 481263 - DNA, 1 bp, Homo sapiens
  chr1:235813621-235813622
  hypo
  upper_gi vs. colorectal
c

SEQ ID NO: 481264 - DNA, 1 bp, Homo sapiens
  chr1:236558377-236558378
  hypo
  upper_gi vs. head_and_neck
c

SEQ ID NO: 481265 - DNA, 836 bp, Homo sapiens; identical to SEQ ID NO: 331173
  chr1:244012299-244013135
  hypo
  upper_gi vs. melanoma

SEQ ID NO: 481266 - DNA, 667 bp, Homo sapiens; identical to SEQ ID NO: 455580
  chr10:6621854-6622521
  hypo
  upper_gi vs. colorectal

SEQ ID NO: 481267 - DNA, 87 bp, Homo sapiens; identical to SEQ ID NO: 350979
  chr10:6622706-6622793
  hypo
  upper_gi vs. colorectal

SEQ ID NO: 481268 - DNA, 61 bp, Homo sapiens; identical to SEQ ID NO: 459300
  chr10:7453036-7453097
  hypo
  upper_gi vs. renal,melanoma,breast,prostate, multiple_myeloma,ovary,bladder_and_urothelial,myeloid_neoplasm, cervical,lymphoid_neoplasm,thyroid,lung,non_cancer,anorectal

SEQ ID NO: 481269 - DNA, 61 bp, Homo sapiens; identical to SEQ ID NO: 459300
  chr10:7453036-7453097
  hypo
  upper_gi vs. melanoma,breast,prostate,renal, multiple_myeloma,ovary,bladder_and_urothelial,anorectal,thyroid, lung,myeloid_neoplasm,non_cancer,lymphoid_neoplasm,cervical

SEQ ID NO: 481270 - DNA, 42 bp, Homo sapiens; identical to SEQ ID NO: 350990
  chr10:11060746-11060788
  hypo
  upper_gi vs. colorectal

SEQ ID NO: 481271 - DNA, 694 bp, Homo sapiens; identical to SEQ ID NO: 480225
  chr10:12391177-12391871
  hypo
  upper_gi vs. liver_bileduct,colorectal, pancreas_gallbladder,head_and_neck

SEQ ID NO: 481272 - DNA, 166 bp, Homo sapiens; identical to SEQ ID NO: 480226
  chr10:12391705-12391871
  hypo
  upper_gi vs. colorectal,liver_bileduct,cervical,lung, pancreas_gallbladder,bladder_and_urothelial,head_and_neck,ovary, anorectal

SEQ ID NO: 481273 - DNA, 324 bp, Homo sapiens; identical to SEQ ID NO: 345344
  chr10:12392327-12392651
  hypo
  upper_gi vs. colorectal,liver_bileduct,cervical,lung, pancreas_gallbladder,bladder_and_urothelial,head_and_neck,ovary, anorectal

SEQ ID NO: 481274 - DNA, 23 bp, Homo sapiens
  chr10:13405240-13405263
  hypo
  upper_gi vs. pancreas_gallbladder
ggaagcacacctccatgcgatgc

SEQ ID NO: 481275 - DNA, 209 bp, Homo sapiens; identical to SEQ ID NO: 452758
  chr10:17270445-17270654
  hypo
  upper_gi vs. melanoma,uterine,multiple_myeloma

SEQ ID NO: 481276 - DNA, 209 bp, Homo sapiens; identical to SEQ ID NO: 452758
  chr10:17270445-17270654
  hypo
  upper_gi vs. melanoma,uterine,ovary,renal, myeloid_neoplasm,non_cancer,thyroid,multiple_myeloma,sarcoma, lung,lymphoid_neoplasm

SEQ ID NO: 481277 - DNA, 260 bp, Homo sapiens; identical to SEQ ID NO: 462295
  chr10:17495133-17495393
  hypo
  upper_gi vs. colorectal

SEQ ID NO: 481278 - DNA, 299 bp, Homo sapiens; identical to SEQ ID NO: 462296
  chr10:17495680-17495979
  hypo
  upper_gi vs. colorectal

SEQ ID NO: 481279 - DNA, 323 bp, Homo sapiens; identical to SEQ ID NO: 462297
  chr10:17495680-17496003
  hypo
  upper_gi vs. colorectal

SEQ ID NO: 481280 - DNA, 15 bp, Homo sapiens
  chr10:17495988-17496003
  hypo
  upper_gi vs. breast,bladder_and_urothelial,ovary, colorectal
cgaccccctccccca

SEQ ID NO: 481281 - DNA, 791 bp, Homo sapiens; identical to SEQ ID NO: 457329
  chr10:31607954-31608745
  hypo
  upper_gi vs. liver_bileduct,bladder_and_urothelial, lymphoid_neoplasm,head_and_neck,pancreas_gallbladder,renal,lung, anorectal,multiple_myeloma

SEQ ID NO: 481282 - DNA, 467 bp, Homo sapiens; identical to SEQ ID NO: 457330
  chr10:31608278-31608745
  hypo
  upper_gi vs. liver_bileduct,renal,lymphoid_neoplasm, head_and_neck,anorectal,bladder_and_urothelial,multiple_myeloma, uterine,sarcoma,lung,prostate,non_cancer,pancreas_gallbladder, myeloid_neoplasm,cervical,ovary,thyroid,breast

SEQ ID NO: 481283 - DNA, 253 bp, Homo sapiens; identical to SEQ ID NO: 455585
  chr10:31609416-31609669
  hypo
  upper_gi vs. renal,lymphoid_neoplasm,anorectal, liver_bileduct,multiple_myeloma,head_and_neck,uterine, bladder_and_urothelial,prostate,sarcoma,non_cancer,ovary, myeloid_neoplasm,pancreas_gallbladder,cervical,thyroid,lung,
  CONT. FROM ABOVE: breast

SEQ ID NO: 481284 - DNA, 253 bp, Homo sapiens; identical to SEQ ID NO: 455585
  chr10:31609416-31609669
  hypo
  upper_gi vs. lymphoid_neoplasm,renal,multiple_myeloma, liver_bileduct,sarcoma,uterine,bladder_and_urothelial, non_cancer,pancreas_gallbladder,myeloid_neoplasm,thyroid

SEQ ID NO: 481285 - DNA, 94 bp, Homo sapiens; identical to SEQ ID NO: 351040
  chr10:50606762-50606856
  hypo
  upper_gi vs. melanoma,prostate

SEQ ID NO: 481286 - DNA, 82 bp, Homo sapiens; identical to SEQ ID NO: 459323
  chr10:92617016-92617098
  hypo
  upper_gi vs. bladder_and_urothelial

SEQ ID NO: 481287 - DNA, 278 bp, Homo sapiens; identical to SEQ ID NO: 459324
  chr10:92617539-92617817
  hypo
  upper_gi vs. bladder_and_urothelial

SEQ ID NO: 481288 - DNA, 373 bp, Homo sapiens; identical to SEQ ID NO: 480271
  chr10:94833649-94834022
  hypo
  upper_gi vs. colorectal

SEQ ID NO: 481289 - DNA, 385 bp, Homo sapiens; identical to SEQ ID NO: 480272
  chr10:94833649-94834034
  hypo
  upper_gi vs. bladder_and_urothelial,prostate

SEQ ID NO: 481290 - DNA, 195 bp, Homo sapiens; identical to SEQ ID NO: 480273
  chr10:99530903-99531098
  hypo
  upper_gi vs. pancreas_gallbladder

SEQ ID NO: 481291 - DNA, 231 bp, Homo sapiens; identical to SEQ ID NO: 454633
  chr10:134733835-134734066
  hypo
  upper_gi vs. anorectal

SEQ ID NO: 481292 - DNA, 4 bp, Homo sapiens
  chr11:8041149-8041153
  hypo
  upper_gi vs. anorectal,head_and_neck
tagc

SEQ ID NO: 481293 - DNA, 345 bp, Homo sapiens; identical to SEQ ID NO: 480287
  chr11:8041149-8041494
  hypo

SEQ ID NO: 481294 - DNA, 61 bp, Homo sapiens; identical to SEQ ID NO: 459349
  chr11:9112971-9113032
  hypo
  upper_gi vs. bladder_and_urothelial,cervical

SEQ ID NO: 481295 - DNA, 61 bp, Homo sapiens; identical to SEQ ID NO: 459349
  chr11:9112971-9113032
  hypo
  upper_gi vs. cervical

SEQ ID NO: 481296 - DNA, 350 bp, Homo sapiens; identical to SEQ ID NO: 340983
  chr11:11833053-11833403
  hypo
  upper_gi vs. liver_bileduct

SEQ ID NO: 481297 - DNA, 61 bp, Homo sapiens; identical to SEQ ID NO: 359822
  chr11:43965299-43965360
  hypo
  upper_gi vs. bladder_and_urothelial

SEQ ID NO: 481298 - DNA, 42 bp, Homo sapiens; identical to SEQ ID NO: 457371
  chr11:43965463-43965505
  hypo
  upper_gi vs. lung

SEQ ID NO: 481299 - DNA, 17 bp, Homo sapiens
  chr11:47358910-47358927
  hypo
  upper_gi vs. lymphoid_neoplasm,prostate
cggggggcaggaccagg

SEQ ID NO: 481300 - DNA, 106 bp, Homo sapiens; identical to SEQ ID NO: 348490
  chr11:47359237-47359343
  hypo
  upper_gi vs. lymphoid_neoplasm,prostate

SEQ ID NO: 481301 - DNA, 316 bp, Homo sapiens; identical to SEQ ID NO: 462351
  chr11:61276101-61276417
  hypo
  upper_gi vs. colorectal

SEQ ID NO: 481302 - DNA, 316 bp, Homo sapiens; identical to SEQ ID NO: 462351
  chr11:61276101-61276417
  hypo
  upper_gi vs. colorectal,cervical,head_and_neck,breast, uterine

SEQ ID NO: 481303 - DNA, 141 bp, Homo sapiens; identical to SEQ ID NO: 348509
  chr11:66513646-66513787
  hypo
  upper_gi vs. lymphoid_neoplasm

SEQ ID NO: 481304 - DNA, 315 bp, Homo sapiens; identical to SEQ ID NO: 456396
  chr11:66626187-66626502
  hypo
  upper_gi vs. liver_bileduct,renal

SEQ ID NO: 481305 - DNA, 339 bp, Homo sapiens; identical to SEQ ID NO: 456397
  chr11:66626187-66626526
  hypo
  upper_gi vs. liver_bileduct

SEQ ID NO: 481306 - DNA, 26 bp, Homo sapiens
  chr11:67764294-67764320
  hypo
aggcctggcctccaggcttcagcccc

SEQ ID NO: 481307 - DNA, 63 bp, Homo sapiens; identical to SEQ ID NO: 354789
  chr11:73073669-73073732
  hypo
  upper_gi vs. cervical,melanoma

SEQ ID NO: 481308 - DNA, 131 bp, Homo sapiens; identical to SEQ ID NO: 347179
  chr11:106889091-106889222
  hypo
  upper_gi vs. head_and_neck,anorectal,breast,melanoma

SEQ ID NO: 481309 - DNA, 227 bp, Homo sapiens; identical to SEQ ID NO: 462363
  chr11:106889091-106889318
  hypo
  upper_gi vs. melanoma,breast,head_and_neck,anorectal

SEQ ID NO: 481310 - DNA, 399 bp, Homo sapiens; identical to SEQ ID NO: 452805
  chr11:115375434-115375833
  hypo
  upper_gi vs. liver_bileduct

SEQ ID NO: 481311 - DNA, 17 bp, Homo sapiens
  chr11:133938756-133938773
  hypo
  upper_gi vs. melanoma
cgccaagttcattgaaa

SEQ ID NO: 481312 - DNA, 161 bp, Homo sapiens; identical to SEQ ID NO: 345407
  chr11:133939437-133939598
  hypo
  upper_gi vs. melanoma

SEQ ID NO: 481313 - DNA, 235 bp, Homo sapiens; identical to SEQ ID NO: 351283
  chr12:1639655-1639890
  hypo
  upper_gi vs. anorectal

SEQ ID NO: 481314 - DNA, 91 bp, Homo sapiens; identical to SEQ ID NO: 466276
  chr12:2161370-2161461
  hypo
  upper_gi vs. colorectal

SEQ ID NO: 481315 - DNA, 86 bp, Homo sapiens; identical to SEQ ID NO: 452813
  chr12:4377809-4377895
  hypo
  upper_gi vs. colorectal,lymphoid_neoplasm,ovary,melanoma, non_cancer,myeloid_neoplasm,thyroid

SEQ ID NO: 481316 - DNA, 142 bp, Homo sapiens; identical to SEQ ID NO: 452814
  chr12:4378558-4378700
  hypo
  upper_gi vs. colorectal,lymphoid_neoplasm,ovary,melanoma, non_cancer,myeloid_neoplasm,thyroid

SEQ ID NO: 481317 - DNA, 245 bp, Homo sapiens; identical to SEQ ID NO: 452815
  chr12:4378558-4378803
  hypo
  upper_gi vs. colorectal,lymphoid_neoplasm,non_cancer, melanoma,myeloid_neoplasm,thyroid,ovary

SEQ ID NO: 481318 - DNA, 88 bp, Homo sapiens; identical to SEQ ID NO: 454142
  chr12:4378715-4378803
  hypo
  upper_gi vs. colorectal,melanoma,lymphoid_neoplasm

SEQ ID NO: 481319 - DNA, 117 bp, Homo sapiens; identical to SEQ ID NO: 347220
  chr12:21681020-21681137
  hypo
  upper_gi vs. ovary,breast,uterine,prostate,renal, myeloid_neoplasm,thyroid,sarcoma,non_cancer,multiple_myeloma, melanoma

SEQ ID NO: 481320 - DNA, 6 bp, Homo sapiens
  chr12:22488262-22488268
  hypo
  upper_gi vs. anorectal,sarcoma,head_and_neck,breast, ovary,lung,renal,melanoma,bladder_and_urothelial,non_cancer, uterine,thyroid
gcgccc

SEQ ID NO: 481321 - DNA, 118 bp, Homo sapiens; identical to SEQ ID NO: 347221
  chr12:22488705-22488823
  hypo
  upper_gi vs. head_and_neck,anorectal,lung,sarcoma,breast, colorectal,renal,bladder_and_urothelial,prostate,uterine

SEQ ID NO: 481322 - DNA, 253 bp, Homo sapiens; identical to SEQ ID NO: 459373
  chr12:24715505-24715758
  hypo
  upper_gi vs. lung,multiple_myeloma,cervical,sarcoma, uterine,breast,liver_bileduct,renal,non_cancer,head_and_neck, melanoma

SEQ ID NO: 481323 - DNA, 253 bp, Homo sapiens; identical to SEQ ID NO: 459373
  chr12:24715505-24715758
  hypo
  upper_gi vs. lung,multiple_myeloma,sarcoma,uterine, breast,renal,non_cancer,cervical

SEQ ID NO: 481324 - DNA, 344 bp, Homo sapiens; identical to SEQ ID NO: 480346
  chr12:28123205-28123549
  hypo
  upper_gi vs. liver_bileduct

SEQ ID NO: 481325 - DNA, 37 bp, Homo sapiens; identical to SEQ ID NO: 454682
  chr12:32831540-32831577
  hypo
  upper_gi vs. colorectal

SEQ ID NO: 481326 - DNA, 77 bp, Homo sapiens; identical to SEQ ID NO: 452819
  chr12:40618264-40618341
  hypo
  upper_gi vs. liver_bileduct

SEQ ID NO: 481327 - DNA, 35 bp, Homo sapiens; identical to SEQ ID NO: 351336
  chr12:40619048-40619083
  hypo
  upper_gi vs. liver_bileduct

SEQ ID NO: 481328 - DNA, 409 bp, Homo sapiens; identical to SEQ ID NO: 457434
  chr12:48577061-48577470
  hypo
  upper_gi vs. anorectal

SEQ ID NO: 481329 - DNA, 3 bp, Homo sapiens
  chr12:52401537-52401540
  hypo
  upper_gi vs. anorectal,head_and_neck,melanoma
tcc

SEQ ID NO: 481330 - DNA, 386 bp, Homo sapiens; identical to SEQ ID NO: 466329
  chr12:81330352-81330738
  hypo
  upper_gi vs. liver_bileduct,pancreas_gallbladder

SEQ ID NO: 481331 - DNA, 187 bp, Homo sapiens; identical to SEQ ID NO: 466330
  chr12:81330551-81330738
  hypo
  upper_gi vs. pancreas_gallbladder,liver_bileduct

SEQ ID NO: 481332 - DNA, 851 bp, Homo sapiens; identical to SEQ ID NO: 457458
  chr12:94542238-94543089
  hypo
  upper_gi vs. melanoma,lymphoid_neoplasm,multiple_myeloma, ovary

SEQ ID NO: 481333 - DNA, 373 bp, Homo sapiens; identical to SEQ ID NO: 457459
  chr12:94542716-94543089
  hypo
  upper_gi vs. non_cancer,thyroid,melanoma,prostate, multiple_myeloma,lymphoid_neoplasm,sarcoma

SEQ ID NO: 481334 - DNA, 31 bp, Homo sapiens; identical to SEQ ID NO: 452825
  chr12:94543992-94544023
  hypo
  upper_gi vs. thyroid,non_cancer,melanoma, multiple_myeloma,sarcoma,lymphoid_neoplasm

SEQ ID NO: 481335 - DNA, 86 bp, Homo sapiens; identical to SEQ ID NO: 345430
  chr12:94544052-94544138
  hypo
  upper_gi vs. thyroid,non_cancer,melanoma, multiple_myeloma,sarcoma,lymphoid_neoplasm

SEQ ID NO: 481336 - DNA, 349 bp, Homo sapiens; identical to SEQ ID NO: 459395
  chr12:104851545-104851894
  hypo
  upper_gi vs. melanoma,multiple_myeloma, pancreas_gallbladder

SEQ ID NO: 481337 - DNA, 52 bp, Homo sapiens; identical to SEQ ID NO: 460051
  chr12:111725459-111725511
  hypo
  upper_gi vs. liver_bileduct

SEQ ID NO: 481338 - DNA, 63 bp, Homo sapiens; identical to SEQ ID NO: 215057
  chr12:111725564-111725627
  hypo
  upper_gi vs. liver_bileduct

SEQ ID NO: 481339 - DNA, 83 bp, Homo sapiens; identical to SEQ ID NO: 345434
  chr12:113495127-113495210
  hypo
  upper_gi vs. multiple_myeloma

SEQ ID NO: 481340 - DNA, 65 bp, Homo sapiens; identical to SEQ ID NO: 462409
  chr12:122688584-122688649
  hypo
  upper_gi vs. cervical,anorectal

SEQ ID NO: 481341 - DNA, 2 bp, Homo sapiens
  chr12:129337804-129337806
  hypo
  upper_gi vs. renal
cg

SEQ ID NO: 481342 - DNA, 26 bp, Homo sapiens
  chr12:132423564-132423590
  hypo
  upper_gi vs. liver_bileduct
cgtgagccactatgcccggccctcca

SEQ ID NO: 481343 - DNA, 173 bp, Homo sapiens; identical to SEQ ID NO: 355019
  chr12:132423854-132424027
  hypo
  upper_gi vs. liver_bileduct

SEQ ID NO: 481344 - DNA, 238 bp, Homo sapiens; identical to SEQ ID NO: 459402
  chr12:133464166-133464404
  hypo
  upper_gi vs. pancreas_gallbladder

SEQ ID NO: 481345 - DNA, 238 bp, Homo sapiens; identical to SEQ ID NO: 459402
  chr12:133464166-133464404
  hypo
  upper_gi vs. pancreas_gallbladder

SEQ ID NO: 481346 - DNA, 219 bp, Homo sapiens; identical to SEQ ID NO: 459403
  chr12:133464555-133464774
  hypo
  upper_gi vs. pancreas_gallbladder

SEQ ID NO: 481347 - DNA, 309 bp, Homo sapiens; identical to SEQ ID NO: 355041
  chr13:30707770-30708079
  hypo
  upper_gi vs. liver_bileduct,melanoma,cervical

SEQ ID NO: 481348 - DNA, 23 bp, Homo sapiens
  chr13:37005451-37005474
  hypo
  upper_gi vs. uterine,renal,lung,ovary, bladder_and_urothelial,breast,thyroid
cgattatttcacctggcttgtca

SEQ ID NO: 481349 - DNA, 23 bp, Homo sapiens
  chr13:46661423-46661446
  hypo
  upper_gi vs. liver_bileduct
gcagcagccgctctagatgggcc

SEQ ID NO: 481350 - DNA, 127 bp, Homo sapiens; identical to SEQ ID NO: 459410
  chr13:103046539-103046666
  hypo
  upper_gi vs. pancreas_gallbladder,liver_bileduct, melanoma,renal,anorectal,thyroid,breast

SEQ ID NO: 481351 - DNA, 3 bp, Homo sapiens
  chr13:114075301-114075304
  hypo
  upper_gi vs. renal,lymphoid_neoplasm
acc

SEQ ID NO: 481352 - DNA, 18 bp, Homo sapiens
  chr13:114497796-114497814
  hypo
  upper_gi vs. lymphoid_neoplasm
cgtgtgatgagcacacat

SEQ ID NO: 481353 - DNA, 223 bp, Homo sapiens; identical to SEQ ID NO: 454169
  chr13:114776788-114777011
  hypo
  upper_gi vs. pancreas_gallbladder

SEQ ID NO: 481354 - DNA, 439 bp, Homo sapiens; identical to SEQ ID NO: 462437
  chr14:36003004-36003443
  hypo
  upper_gi vs. head_and_neck,anorectal,cervical

SEQ ID NO: 481355 - DNA, 150 bp, Homo sapiens; identical to SEQ ID NO: 462438
  chr14:36003293-36003443
  hypo
  upper_gi vs. head_and_neck,prostate,thyroid

SEQ ID NO: 481356 - DNA, 215 bp, Homo sapiens; identical to SEQ ID NO: 473766
  chr14:51562012-51562227
  hypo
  upper_gi vs. renal,prostate,bladder_and_urothelial, myeloid_neoplasm,non_cancer,thyroid,multiple_myeloma,ovary, sarcoma,breast,lung,melanoma,cervical,lymphoid_neoplasm

SEQ ID NO: 481357 - DNA, 224 bp, Homo sapiens; identical to SEQ ID NO: 457524
  chr14:51562012-51562236
  hypo
  upper_gi vs. ovary,bladder_and_urothelial,lung,renal, uterine,pancreas_gallbladder,sarcoma,breast,multiple_myeloma, prostate,head_and_neck,colorectal,myeloid_neoplasm,non_cancer, thyroid,cervical,anorectal,lymphoid_neoplasm

SEQ ID NO: 481358 - DNA, 50 bp, Homo sapiens; identical to SEQ ID NO: 355132
  chr14:65239794-65239844
  hypo
  upper_gi vs. colorectal,lymphoid_neoplasm

SEQ ID NO: 481359 - DNA, 9 bp, Homo sapiens
  chr14:70654358-70654367
  hypo
  upper_gi vs. thyroid,non_cancer,multiple_myeloma, myeloid_neoplasm,melanoma,sarcoma,renal
cgcgcgcgc

SEQ ID NO: 481360 - DNA, 1 bp, Homo sapiens
  chr14:73602342-73602343
  hypo
  upper_gi vs. melanoma,renal
c

SEQ ID NO: 481361 - DNA, 188 bp, Homo sapiens; identical to SEQ ID NO: 466434
  chr14:92980770-92980958
  hypo
  upper_gi vs. colorectal

SEQ ID NO: 481362 - DNA, 210 bp, Homo sapiens; identical to SEQ ID NO: 480403
  chr14:96505691-96505901
  hypo
  upper_gi vs. liver_bileduct

SEQ ID NO: 481363 - DNA, 100 bp, Homo sapiens; identical to SEQ ID NO: 480404
  chr14:96506053-96506153
  hypo
  upper_gi vs. liver_bileduct

SEQ ID NO: 481364 - DNA, 210 bp, Homo sapiens; identical to SEQ ID NO: 480403
  chr14:96505691-96505901
  hypo
  upper_gi vs. liver_bileduct

SEQ ID NO: 481365 - DNA, 291 bp, Homo sapiens; identical to SEQ ID NO: 480406
  chr14:96506053-96506344
  hypo
  upper_gi vs. liver_bileduct

SEQ ID NO: 481366 - DNA, 85 bp, Homo sapiens; identical to SEQ ID NO: 355221
  chr14:105472075-105472160
  hypo
  upper_gi vs. liver_bileduct

SEQ ID NO: 481367 - DNA, 78 bp, Homo sapiens; identical to SEQ ID NO: 452897
  chr15:48936649-48936727
  hypo
  upper_gi vs. lung,sarcoma,head_and_neck,uterine,prostate, multiple_myeloma,ovary,myeloid_neoplasm,renal,thyroid, non_cancer,melanoma,bladder_and_urothelial,breast

SEQ ID NO: 481368 - DNA, 974 bp, Homo sapiens; identical to SEQ ID NO: 480431
  chr15:60884078-60885052
  hypo
  upper_gi vs. pancreas_gallbladder

SEQ ID NO: 481369 - DNA, 10 bp, Homo sapiens
  chr15:72412074-72412084
  hypo
  upper_gi vs. liver_bileduct
cgagactccg

SEQ ID NO: 481370 - DNA, 376 bp, Homo sapiens; identical to SEQ ID NO: 480439
  chr15:74725128-74725504
  hypo
  upper_gi vs. pancreas_gallbladder

SEQ ID NO: 481371 - DNA, 360 bp, Homo sapiens; identical to SEQ ID NO: 480440
  chr15:74725548-74725908
  hypo
  upper_gi vs. pancreas_gallbladder

SEQ ID NO: 481372 - DNA, 66 bp, Homo sapiens; identical to SEQ ID NO: 480441
  chr15:74725438-74725504
  hypo
  upper_gi vs. pancreas_gallbladder

SEQ ID NO: 481373 - DNA, 675 bp, Homo sapiens; identical to SEQ ID NO: 373734
  chr15:74725548-74726223
  hypo
  upper_gi vs. pancreas_gallbladder

SEQ ID NO: 481374 - DNA, 74 bp, Homo sapiens; identical to SEQ ID NO: 480446
  chr15:83377928-83378002
  hypo
  upper_gi vs. colorectal,head_and_neck, pancreas_gallbladder,melanoma

SEQ ID NO: 481375 - DNA, 126 bp, Homo sapiens; identical to SEQ ID NO: 480447
  chr15:83378087-83378213
  hypo
  upper_gi vs. colorectal,head_and_neck, pancreas_gallbladder,melanoma

SEQ ID NO: 481376 - DNA, 22 bp, Homo sapiens
  chr16:9062199-9062221
  hypo
  upper_gi vs. liver_bileduct
gttggccagtgcattcgctcac

SEQ ID NO: 481377 - DNA, 10 bp, Homo sapiens
  chr16:23846783-23846793
  hypo
  upper_gi vs. non_cancer,myeloid_neoplasm,thyroid, melanoma,bladder_and_urothelial,multiple_myeloma, lymphoid_neoplasm
cgctcctccc

SEQ ID NO: 481378 - DNA, 54 bp, Homo sapiens; identical to SEQ ID NO: 381194
  chr16:30826509-30826563
  hypo
  upper_gi vs. lymphoid_neoplasm

SEQ ID NO: 481379 - DNA, 61 bp, Homo sapiens; identical to SEQ ID NO: 473829
  chr16:56225663-56225724
  hypo
  upper_gi vs. anorectal

SEQ ID NO: 481380 - DNA, 94 bp, Homo sapiens; identical to SEQ ID NO: 453706
  chr16:67313759-67313853
  hypo
  upper_gi vs. pancreas_gallbladder

SEQ ID NO: 481381 - DNA, 115 bp, Homo sapiens; identical to SEQ ID NO: 348747
  chr16:67313958-67314073
  hypo
  upper_gi vs. pancreas_gallbladder

SEQ ID NO: 481382 - DNA, 79 bp, Homo sapiens; identical to SEQ ID NO: 460132
  chr16:71715666-71715745
  hypo
  upper_gi vs. lymphoid_neoplasm,cervical

SEQ ID NO: 481383 - DNA, 82 bp, Homo sapiens; identical to SEQ ID NO: 204296
  chr16:77246930-77247012
  hypo
  upper_gi vs. cervical,head_and_neck,lung,prostate

SEQ ID NO: 481384 - DNA, 49 bp, Homo sapiens; identical to SEQ ID NO: 452920
  chr16:77822069-77822118
  hypo
  upper_gi vs. sarcoma,renal,melanoma,multiple_myeloma

SEQ ID NO: 481385 - DNA, 31 bp, Homo sapiens; identical to SEQ ID NO: 457594
  chr16:80837324-80837355
  hypo
  upper_gi vs. liver_bileduct,bladder_and_urothelial

SEQ ID NO: 481386 - DNA, 539 bp, Homo sapiens; identical to SEQ ID NO: 457595
  chr16:80837424-80837963
  hypo
  upper_gi vs. liver_bileduct,bladder_and_urothelial

SEQ ID NO: 481387 - DNA, 323 bp, Homo sapiens; identical to SEQ ID NO: 480475
  chr16:80837640-80837963
  hypo
  upper_gi vs. colorectal,liver_bileduct

SEQ ID NO: 481388 - DNA, 246 bp, Homo sapiens; identical to SEQ ID NO: 480480
  chr16:86543378-86543624
  hypo
  upper_gi vs. cervical

SEQ ID NO: 481389 - DNA, 353 bp, Homo sapiens; identical to SEQ ID NO: 462520
  chr16:86543822-86544175
  hypo
  upper_gi vs. cervical

SEQ ID NO: 481390 - DNA, 67 bp, Homo sapiens
  chr16:87594891-87594958
  hypo
  upper_gi vs. pancreas_gallbladder
cgccttcatctttcgtcaacatctgtccaaatagtacctttaaaaatcattgccaaagcgtttgctc

SEQ ID NO: 481391 - DNA, 400 bp, Homo sapiens; identical to SEQ ID NO: 462524
  chr16:89006909-89007309
  hypo
  upper_gi vs. breast,cervical,multiple_myeloma,colorectal, sarcoma

SEQ ID NO: 481392 - DNA, 84 bp, Homo sapiens; identical to SEQ ID NO: 462525
  chr16:89007225-89007309
  hypo
  upper_gi vs. cervical,anorectal,breast,colorectal, lymphoid_neoplasm,multiple_myeloma,sarcoma,melanoma,uterine

SEQ ID NO: 481393 - DNA, 92 bp, Homo sapiens; identical to SEQ ID NO: 462526
  chr16:89007789-89007881
  hypo
  upper_gi vs. cervical,anorectal,breast,colorectal, lymphoid_neoplasm,multiple_myeloma,sarcoma,melanoma,uterine

SEQ ID NO: 481394 - DNA, 211 bp, Homo sapiens; identical to SEQ ID NO: 347401
  chr16:89007995-89008206
  hypo
  upper_gi vs. cervical,anorectal,breast,colorectal, lymphoid_neoplasm,multiple_myeloma,sarcoma,melanoma,uterine

SEQ ID NO: 481395 - DNA, 92 bp, Homo sapiens; identical to SEQ ID NO: 462526
  chr16:89007789-89007881
  hypo
  upper_gi vs. breast,colorectal,lymphoid_neoplasm,sarcoma, melanoma

SEQ ID NO: 481396 - DNA, 374 bp, Homo sapiens; identical to SEQ ID NO: 462529
  chr16:89007995-89008369
  hypo
  upper_gi vs. breast,colorectal,lymphoid_neoplasm,sarcoma, melanoma

SEQ ID NO: 481397 - DNA, 7 bp, Homo sapiens
  chr16:89008592-89008599
  hypo
  upper_gi vs. breast,colorectal,lymphoid_neoplasm,sarcoma, melanoma
cccgccc

SEQ ID NO: 481398 - DNA, 4 bp, Homo sapiens
  chr16:89883921-89883925
  hypo
  upper_gi vs. anorectal
cggc

SEQ ID NO: 481399 - DNA, 3 bp, Homo sapiens
  chr16:89884344-89884347
  hypo
  upper_gi vs. anorectal
gcc

SEQ ID NO: 481400 - DNA, 25 bp, Homo sapiens
  chr16:89899939-89899964
  hypo
  upper_gi vs. melanoma,lymphoid_neoplasm
cgccctgctgggctcaggggcaggt

SEQ ID NO: 481401 - DNA, 489 bp, Homo sapiens; identical to SEQ ID NO: 454870
  chr16:89900815-89901304
  hypo
  upper_gi vs. melanoma

SEQ ID NO: 481402 - DNA, 261 bp, Homo sapiens; identical to SEQ ID NO: 480493
  chr17:14204242-14204503
  hypo
  upper_gi vs. colorectal,liver_bileduct

SEQ ID NO: 481403 - DNA, 261 bp, Homo sapiens; identical to SEQ ID NO: 480493
  chr17:14204242-14204503
  hypo
  upper_gi vs. colorectal,pancreas_gallbladder

SEQ ID NO: 481404 - DNA, 169 bp, Homo sapiens; identical to SEQ ID NO: 480495
  chr17:14204834-14205003
  hypo
  upper_gi vs. colorectal,pancreas_gallbladder

SEQ ID NO: 481405 - DNA, 33 bp, Homo sapiens; identical to SEQ ID NO: 462542
  chr17:29718746-29718779
  hypo
  upper_gi vs. cervical

SEQ ID NO: 481406 - DNA, 1 bp, Homo sapiens
  chr17:29719289-29719290
  hypo
  upper_gi vs. cervical
c

SEQ ID NO: 481407 - DNA, 25 bp, Homo sapiens
  chr17:49229457-49229482
  hypo
  upper_gi vs. renal,melanoma,lymphoid_neoplasm, multiple_myeloma,liver_bileduct,prostate,non_cancer,uterine, myeloid_neoplasm,thyroid
cgcgggaagctgagtcacgagaatc

SEQ ID NO: 481408 - DNA, 216 bp, Homo sapiens; identical to SEQ ID NO: 457619
  chr17:56327007-56327223
  hypo
  upper_gi vs. bladder_and_urothelial,anorectal,prostate, lung,head_and_neck

SEQ ID NO: 481409 - DNA, 48 bp, Homo sapiens; identical to SEQ ID NO: 348820
  chr17:57297129-57297177
  hypo
  upper_gi vs. lymphoid_neoplasm

SEQ ID NO: 481410 - DNA, 146 bp, Homo sapiens; identical to SEQ ID NO: 458729
  chr17:57787150-57787296
  hypo
  upper_gi vs. colorectal

SEQ ID NO: 481411 - DNA, 112 bp, Homo sapiens; identical to SEQ ID NO: 454237
  chr17:61777761-61777873
  hypo
  upper_gi vs. cervical

SEQ ID NO: 481412 - DNA, 76 bp, Homo sapiens; identical to SEQ ID NO: 345537
  chr17:61778423-61778499
  hypo
  upper_gi vs. cervical

SEQ ID NO: 481413 - DNA, 212 bp, Homo sapiens; identical to SEQ ID NO: 460170
  chr17:73613151-73613363
  hypo

SEQ ID NO: 481414 - DNA, 527 bp, Homo sapiens; identical to SEQ ID NO: 367350
  chr17:73613424-73613951
  hypo

SEQ ID NO: 481415 - DNA, 84 bp, Homo sapiens; identical to SEQ ID NO: 476194
  chr17:76100954-76101038
  hypo
  upper_gi vs. liver_bileduct

SEQ ID NO: 481416 - DNA, 632 bp, Homo sapiens; identical to SEQ ID NO: 460174
  chr17:76992727-76993359
  hypo
  upper_gi vs. liver_bileduct

SEQ ID NO: 481417 - DNA, 142 bp, Homo sapiens; identical to SEQ ID NO: 348846
  chr17:76993419-76993561
  hypo
  upper_gi vs. liver_bileduct

SEQ ID NO: 481418 - DNA, 261 bp, Homo sapiens; identical to SEQ ID NO: 343164
  chr17:76998502-76998763
  hypo
  upper_gi vs. liver_bileduct

SEQ ID NO: 481419 - DNA, 238 bp, Homo sapiens; identical to SEQ ID NO: 345538
  chr18:2848166-2848404
  hypo
  upper_gi vs. uterine

SEQ ID NO: 481420 - DNA, 22 bp, Homo sapiens
  chr18:7566988-7567010
  hypo
  upper_gi vs. liver_bileduct
cgcggctcgtgacccgggacaa

SEQ ID NO: 481421 - DNA, 416 bp, Homo sapiens; identical to SEQ ID NO: 466678
  chr18:7567335-7567751
  hypo
  upper_gi vs. liver_bileduct

SEQ ID NO: 481422 - DNA, 273 bp, Homo sapiens; identical to SEQ ID NO: 459494
  chr18:7567478-7567751
  hypo
  upper_gi vs. liver_bileduct

SEQ ID NO: 481423 - DNA, 928 bp, Homo sapiens; identical to SEQ ID NO: 335756
  chr18:13217150-13218078
  hypo
  upper_gi vs. colorectal

SEQ ID NO: 481424 - DNA, 105 bp, Homo sapiens; identical to SEQ ID NO: 352078
  chr18:25756986-25757091
  hypo
  upper_gi vs. liver_bileduct

SEQ ID NO: 481425 - DNA, 202 bp, Homo sapiens; identical to SEQ ID NO: 452944
  chr18:25756986-25757188
  hypo
  upper_gi vs. liver_bileduct

SEQ ID NO: 481426 - DNA, 42 bp, Homo sapiens; identical to SEQ ID NO: 452945
  chr18:25757146-25757188
  hypo
  upper_gi vs. liver_bileduct

SEQ ID NO: 481427 - DNA, 756 bp, Homo sapiens; identical to SEQ ID NO: 480524
  chr18:42258983-42259739
  hypo
  upper_gi vs. pancreas_gallbladder,liver_bileduct, lymphoid_neoplasm,melanoma,colorectal,breast,cervical,anorectal, multiple_myeloma

SEQ ID NO: 481428 - DNA, 361 bp, Homo sapiens; identical to SEQ ID NO: 480525
  chr18:42259378-42259739
  hypo
  upper_gi vs. pancreas_gallbladder,liver_bileduct, lymphoid_neoplasm,breast,cervical,melanoma,anorectal,colorectal, multiple_myeloma,prostate

SEQ ID NO: 481429 - DNA, 121 bp, Homo sapiens; identical to SEQ ID NO: 480526
  chr18:42259821-42259942
  hypo
  upper_gi vs. pancreas_gallbladder,liver_bileduct, lymphoid_neoplasm,breast,cervical,melanoma,anorectal,colorectal, multiple_myeloma,prostate

SEQ ID NO: 481430 - DNA, 268 bp, Homo sapiens; identical to SEQ ID NO: 480527
  chr18:42260083-42260351
  hypo
  upper_gi vs. pancreas_gallbladder,liver_bileduct, lymphoid_neoplasm,breast,cervical,melanoma,anorectal,colorectal, multiple_myeloma,prostate

SEQ ID NO: 481431 - DNA, 53 bp, Homo sapiens; identical to SEQ ID NO: 480528
  chr18:42259889-42259942
  hypo
  upper_gi vs. pancreas_gallbladder,liver_bileduct, lymphoid_neoplasm,melanoma,cervical,breast,ovary, multiple_myeloma,prostate,colorectal,uterine

SEQ ID NO: 481432 - DNA, 711 bp, Homo sapiens; identical to SEQ ID NO: 347500
  chr18:42260083-42260794
  hypo
  upper_gi vs. pancreas_gallbladder,liver_bileduct, lymphoid_neoplasm,melanoma,cervical,breast,ovary, multiple_myeloma,prostate,colorectal,uterine

SEQ ID NO: 481433 - DNA, 880 bp, Homo sapiens; identical to SEQ ID NO: 480530
  chr18:42260367-42261247
  hypo
  upper_gi vs. pancreas_gallbladder,liver_bileduct, cervical,lymphoid_neoplasm

SEQ ID NO: 481434 - DNA, 190 bp, Homo sapiens; identical to SEQ ID NO: 361257
  chr18:43914608-43914798
  hypo
  upper_gi vs. bladder_and_urothelial

SEQ ID NO: 481435 - DNA, 14 bp, Homo sapiens
  chr18:44337138-44337152
  hypo
  upper_gi vs. myeloid_neoplasm,thyroid,non_cancer,sarcoma
caggggctgggcgc

SEQ ID NO: 481436 - DNA, 53 bp, Homo sapiens; identical to SEQ ID NO: 352104
  chr18:53257322-53257375
  hypo
  upper_gi vs. cervical

SEQ ID NO: 481437 - DNA, 291 bp, Homo sapiens; identical to SEQ ID NO: 454270
  chr19:813406-813697
  hypo
  upper_gi vs. pancreas_gallbladder

SEQ ID NO: 481438 - DNA, 322 bp, Homo sapiens; identical to SEQ ID NO: 352133
  chr19:813830-814152
  hypo
  upper_gi vs. pancreas_gallbladder

SEQ ID NO: 481439 - DNA, 229 bp, Homo sapiens; identical to SEQ ID NO: 456692
  chr19:1004547-1004776
  hypo
  upper_gi vs. renal,lymphoid_neoplasm,liver_bileduct

SEQ ID NO: 481440 - DNA, 279 bp, Homo sapiens; identical to SEQ ID NO: 218770
  chr19:1005441-1005720
  hypo
  upper_gi vs. renal,lymphoid_neoplasm

SEQ ID NO: 481441 - DNA, 233 bp, Homo sapiens; identical to SEQ ID NO: 453785
  chr19:1978023-1978256
  hypo
  upper_gi vs. liver_bileduct

SEQ ID NO: 481442 - DNA, 116 bp, Homo sapiens; identical to SEQ ID NO: 345560
  chr19:1979018-1979134
  hypo
  upper_gi vs. liver_bileduct

SEQ ID NO: 481443 - DNA, 181 bp, Homo sapiens; identical to SEQ ID NO: 367778
  chr19:1993286-1993467
  hypo
  upper_gi vs. liver_bileduct

SEQ ID NO: 481444 - DNA, 323 bp, Homo sapiens; identical to SEQ ID NO: 361399
  chr19:6590881-6591204
  hypo
  upper_gi vs. lymphoid_neoplasm

SEQ ID NO: 481445 - DNA, 685 bp, Homo sapiens; identical to SEQ ID NO: 335930
  chr19:8274278-8274963
  hypo
  upper_gi vs. cervical,lymphoid_neoplasm

SEQ ID NO: 481446 - DNA, 485 bp, Homo sapiens; identical to SEQ ID NO: 462606
  chr19:10529649-10530134
  hypo
  upper_gi vs. bladder_and_urothelial,head_and_neck

SEQ ID NO: 481447 - DNA, 111 bp, Homo sapiens; identical to SEQ ID NO: 352184
  chr19:10530526-10530637
  hypo
  upper_gi vs. bladder_and_urothelial,head_and_neck

SEQ ID NO: 481448 - DNA, 631 bp, Homo sapiens; identical to SEQ ID NO: 457670
  chr19:10530654-10531285
  hypo
  upper_gi vs. sarcoma,breast,uterine,prostate, head_and_neck

SEQ ID NO: 481449 - DNA, 139 bp, Homo sapiens; identical to SEQ ID NO: 457671
  chr19:10531146-10531285
  hypo
  upper_gi vs. prostate,sarcoma,uterine,breast, head_and_neck

SEQ ID NO: 481450 - DNA, 189 bp, Homo sapiens; identical to SEQ ID NO: 347537
  chr19:11593453-11593642
  hypo
  upper_gi vs. anorectal

SEQ ID NO: 481451 - DNA, 3 bp, Homo sapiens
  chr19:12266891-12266894
  hypo
  upper_gi vs. bladder_and_urothelial,sarcoma
cga

SEQ ID NO: 481452 - DNA, 106 bp, Homo sapiens; identical to SEQ ID NO: 459516
  chr19:17392397-17392503
  hypo
  upper_gi vs. anorectal

SEQ ID NO: 481453 - DNA, 61 bp, Homo sapiens; identical to SEQ ID NO: 455841
  chr19:30718934-30718995
  hypo
  upper_gi vs. melanoma

SEQ ID NO: 481454 - DNA, 61 bp, Homo sapiens; identical to SEQ ID NO: 455841
  chr19:30718934-30718995
  hypo
  upper_gi vs. melanoma,sarcoma

SEQ ID NO: 481455 - DNA, 68 bp, Homo sapiens; identical to SEQ ID NO: 473968
  chr19:39997621-39997689
  hypo
  upper_gi vs. cervical,head_and_neck

SEQ ID NO: 481456 - DNA, 3 bp, Homo sapiens
  chr19:41881461-41881464
  hypo
  upper_gi vs. colorectal
cgt

SEQ ID NO: 481457 - DNA, 3 bp, Homo sapiens
  chr19:41881583-41881586
  hypo
  upper_gi vs. colorectal
cgc

SEQ ID NO: 481458 - DNA, 219 bp, Homo sapiens; identical to SEQ ID NO: 453035
  chr19:50553779-50553998
  hypo
  upper_gi vs. colorectal

SEQ ID NO: 481459 - DNA, 73 bp, Homo sapiens; identical to SEQ ID NO: 345605
  chr19:51228809-51228882
  hypo
  upper_gi vs. melanoma,cervical,uterine,prostate,ovary, thyroid,colorectal,head_and_neck,breast,non_cancer, myeloid_neoplasm

SEQ ID NO: 481460 - DNA, 140 bp, Homo sapiens; identical to SEQ ID NO: 453051
  chr19:53606073-53606213
  hypo
  upper_gi vs. colorectal

SEQ ID NO: 481461 - DNA, 222 bp, Homo sapiens; identical to SEQ ID NO: 453052
  chr19:53606354-53606576
  hypo
  upper_gi vs. colorectal

SEQ ID NO: 481462 - DNA, 176 bp, Homo sapiens; identical to SEQ ID NO: 453054
  chr19:53606400-53606576
  hypo
  upper_gi vs. colorectal

SEQ ID NO: 481463 - DNA, 17 bp, Homo sapiens
  chr19:56159257-56159274
  hypo
  upper_gi vs. cervical,lymphoid_neoplasm
cgccacccaatccgggg

SEQ ID NO: 481464 - DNA, 246 bp, Homo sapiens; identical to SEQ ID NO: 480621
  chr19:56159669-56159915
  hypo
  upper_gi vs. cervical,lymphoid_neoplasm

SEQ ID NO: 481465 - DNA, 68 bp, Homo sapiens; identical to SEQ ID NO: 352417
  chr19:56159950-56160018
  hypo
  upper_gi vs. cervical,lymphoid_neoplasm

SEQ ID NO: 481466 - DNA, 412 bp, Homo sapiens; identical to SEQ ID NO: 460234
  chr19:56199006-56199418
  hypo
  upper_gi vs. liver_bileduct

SEQ ID NO: 481467 - DNA, 133 bp, Homo sapiens; identical to SEQ ID NO: 356223
  chr19:56199619-56199752
  hypo
  upper_gi vs. liver_bileduct

SEQ ID NO: 481468 - DNA, 16 bp, Homo sapiens
  chr19:56727917-56727933
  hypo
caccgaatccctccac

SEQ ID NO: 481469 - DNA, 18 bp, Homo sapiens
  chr19:56915935-56915953
  hypo
  upper_gi vs. uterine,prostate,myeloid_neoplasm,thyroid, non_cancer,breast
gtttgacagtgtggaatc

SEQ ID NO: 481470 - DNA, 31 bp, Homo sapiens; identical to SEQ ID NO: 453076
  chr19:58125385-58125416
  hypo
  upper_gi vs. pancreas_gallbladder

SEQ ID NO: 481471 - DNA, 169 bp, Homo sapiens; identical to SEQ ID NO: 480629
  chr19:58665973-58666142
  hypo
  upper_gi vs. melanoma

SEQ ID NO: 481472 - DNA, 227 bp, Homo sapiens; identical to SEQ ID NO: 480630
  chr19:58666733-58666960
  hypo
  upper_gi vs. melanoma

SEQ ID NO: 481473 - DNA, 344 bp, Homo sapiens; identical to SEQ ID NO: 457823
  chr19:58694209-58694553
  hypo
  upper_gi vs. pancreas_gallbladder,anorectal,prostate

SEQ ID NO: 481474 - DNA, 52 bp, Homo sapiens; identical to SEQ ID NO: 457824
  chr19:58694501-58694553
  hypo
  upper_gi vs. pancreas_gallbladder,anorectal,prostate

SEQ ID NO: 481475 - DNA, 4 bp, Homo sapiens
  chr2:10151899-10151903
  hypo
  upper_gi vs. liver_bileduct
cgta

SEQ ID NO: 481476 - DNA, 2 bp, Homo sapiens
  chr2:10152022-10152024
  hypo
  upper_gi vs. liver_bileduct
gc

SEQ ID NO: 481477 - DNA, 91 bp, Homo sapiens; identical to SEQ ID NO: 455044
  chr2:10152958-10153049
  hypo
  upper_gi vs. lymphoid_neoplasm,renal,melanoma, liver_bileduct,breast,prostate

SEQ ID NO: 481478 - DNA, 20 bp, Homo sapiens
  chr2:10153468-10153488
  hypo
  upper_gi vs. lymphoid_neoplasm,renal,melanoma, liver_bileduct,breast,prostate
atatgggtatgtgtatgggc

SEQ ID NO: 481479 - DNA, 30 bp, Homo sapiens; identical to SEQ ID NO: 455048
  chr2:10154879-10154909
  hypo
  upper_gi vs. lymphoid_neoplasm

SEQ ID NO: 481480 - DNA, 93 bp, Homo sapiens; identical to SEQ ID NO: 455049
  chr2:10155172-10155265
  hypo
  upper_gi vs. lymphoid_neoplasm,liver_bileduct,melanoma

SEQ ID NO: 481481 - DNA, 12 bp, Homo sapiens
  chr2:10155388-10155400
  hypo
  upper_gi vs. lymphoid_neoplasm,liver_bileduct,melanoma
gtgcttatgggc

SEQ ID NO: 481482 - DNA, 166 bp, Homo sapiens; identical to SEQ ID NO: 337532
  chr2:10155780-10155946
  hypo
  upper_gi vs. lymphoid_neoplasm,renal

SEQ ID NO: 481483 - DNA, 63 bp, Homo sapiens; identical to SEQ ID NO: 455051
  chr2:10156251-10156314
  hypo
  upper_gi vs. melanoma,lymphoid_neoplasm,liver_bileduct, sarcoma,renal,breast,prostate,non_cancer

SEQ ID NO: 481484 - DNA, 5 bp, Homo sapiens
  chr2:25391009-25391014
  hypo
  upper_gi vs. uterine,ovary
cgaaa

SEQ ID NO: 481485 - DNA, 22 bp, Homo sapiens
  chr2:25391734-25391756
  hypo
  upper_gi vs. uterine,ovary
gcacccccgtgtggggcaggcc

SEQ ID NO: 481486 - DNA, 17 bp, Homo sapiens
  chr2:27484883-27484900
  hypo
  upper_gi vs. anorectal,uterine,cervical
cggacggtcagccgaca

SEQ ID NO: 481487 - DNA, 22 bp, Homo sapiens
  chr2:29337909-29337931
  hypo
  upper_gi vs. cervical,pancreas_gallbladder
cgtgggtgtagcacggattagg

SEQ ID NO: 481488 - DNA, 69 bp, Homo sapiens; identical to SEQ ID NO: 459569
  chr2:31361021-31361090
  hypo
  upper_gi vs. head_and_neck,renal,breast, pancreas_gallbladder,lung,cervical,ovary,prostate,thyroid, non_cancer,bladder_and_urothelial,lymphoid_neoplasm,sarcoma, uterine,myeloid_neoplasm

SEQ ID NO: 481489 - DNA, 179 bp, Homo sapiens; identical to SEQ ID NO: 459570
  chr2:31361118-31361297
  hypo
  upper_gi vs. head_and_neck,renal,breast, pancreas_gallbladder,lung,cervical,ovary,prostate,thyroid, non_cancer,bladder_and_urothelial,lymphoid_neoplasm,sarcoma, uterine,myeloid_neoplasm

SEQ ID NO: 481490 - DNA, 69 bp, Homo sapiens; identical to SEQ ID NO: 459569
  chr2:31361021-31361090
  hypo
  upper_gi vs. pancreas_gallbladder,head_and_neck,breast, ovary,uterine,renal,lung,cervical,lymphoid_neoplasm, multiple_myeloma,bladder_and_urothelial

SEQ ID NO: 481491 - DNA, 179 bp, Homo sapiens; identical to SEQ ID NO: 459570
  chr2:31361118-31361297
  hypo
  upper_gi vs. pancreas_gallbladder,head_and_neck,breast, ovary,uterine,renal,lung,cervical,lymphoid_neoplasm, multiple_myeloma,bladder_and_urothelial

SEQ ID NO: 481492 - DNA, 70 bp, Homo sapiens; identical to SEQ ID NO: 346429
  chr2:31361690-31361760
  hypo
  upper_gi vs. pancreas_gallbladder,head_and_neck,breast, ovary,uterine,renal,lung,cervical,lymphoid_neoplasm, multiple_myeloma,bladder_and_urothelial

SEQ ID NO: 481493 - DNA, 163 bp, Homo sapiens; identical to SEQ ID NO: 349538
  chr2:87018396-87018559
  hypo
  upper_gi vs. myeloid_neoplasm,ovary

SEQ ID NO: 481494 - DNA, 147 bp, Homo sapiens; identical to SEQ ID NO: 457849
  chr2:101033445-101033592
  hypo
  upper_gi vs. melanoma,lymphoid_neoplasm,anorectal, prostate,breast,lung,sarcoma,multiple_myeloma,renal,uterine, ovary,non_cancer,myeloid_neoplasm

SEQ ID NO: 481495 - DNA, 144 bp, Homo sapiens; identical to SEQ ID NO: 345031
  chr2:105471069-105471213
  hypo
  upper_gi vs. melanoma

SEQ ID NO: 481496 - DNA, 455 bp, Homo sapiens; identical to SEQ ID NO: 474007
  chr2:105760109-105760564
  hypo
  upper_gi vs. bladder_and_urothelial

SEQ ID NO: 481497 - DNA, 330 bp, Homo sapiens; identical to SEQ ID NO: 353167
  chr2:120974105-120974435
  hypo
  upper_gi vs. liver_bileduct,lymphoid_neoplasm

SEQ ID NO: 481498 - DNA, 6 bp, Homo sapiens
  chr2:127535179-127535185
  hypo
  upper_gi vs. melanoma,liver_bileduct,breast, bladder_and_urothelial,colorectal
aagggc

SEQ ID NO: 481499 - DNA, 51 bp, Homo sapiens; identical to SEQ ID NO: 453124
  chr2:149632592-149632643
  hypo
  upper_gi vs. ovary,prostate,sarcoma,thyroid,breast, non_cancer,bladder_and_urothelial,uterine,melanoma

SEQ ID NO: 481500 - DNA, 101 bp, Homo sapiens; identical to SEQ ID NO: 453132
  chr2:168148871-168148972
  hypo
  upper_gi vs. pancreas_gallbladder

SEQ ID NO: 481501 - DNA, 240 bp, Homo sapiens; identical to SEQ ID NO: 453133
  chr2:168149264-168149504
  hypo
  upper_gi vs. pancreas_gallbladder

SEQ ID NO: 481502 - DNA, 152 bp, Homo sapiens; identical to SEQ ID NO: 453134
  chr2:168149556-168149708
  hypo
  upper_gi vs. pancreas_gallbladder

SEQ ID NO: 481503 - DNA, 240 bp, Homo sapiens; identical to SEQ ID NO: 453133
  chr2:168149264-168149504
  hypo
  upper_gi vs. colorectal

SEQ ID NO: 481504 - DNA, 221 bp, Homo sapiens; identical to SEQ ID NO: 453136
  chr2:168149556-168149777
  hypo
  upper_gi vs. colorectal

SEQ ID NO: 481505 - DNA, 64 bp, Homo sapiens; identical to SEQ ID NO: 454336
  chr2:168149713-168149777
  hypo
  upper_gi vs. colorectal

SEQ ID NO: 481506 - DNA, 220 bp, Homo sapiens; identical to SEQ ID NO: 466996
  chr2:177052744-177052964
  hypo
  upper_gi vs. colorectal

SEQ ID NO: 481507 - DNA, 56 bp, Homo sapiens; identical to SEQ ID NO: 480689
  chr2:177502170-177502226
  hypo
  upper_gi vs. colorectal,cervical,melanoma,renal

SEQ ID NO: 481508 - DNA, 61 bp, Homo sapiens; identical to SEQ ID NO: 480690
  chr2:177502920-177502981
  hypo
  upper_gi vs. colorectal,cervical,melanoma,renal

SEQ ID NO: 481509 - DNA, 30 bp, Homo sapiens; identical to SEQ ID NO: 480691
  chr2:177503135-177503165
  hypo
  upper_gi vs. colorectal,cervical,melanoma,renal

SEQ ID NO: 481510 - DNA, 17 bp, Homo sapiens
  chr2:193058995-193059012
  hypo
  upper_gi vs. ovary
cgcgctagggtaggctg

SEQ ID NO: 481511 - DNA, 58 bp, Homo sapiens; identical to SEQ ID NO: 469005
  chr2:207307406-207307464
  hypo
  upper_gi vs. sarcoma,myeloid_neoplasm

SEQ ID NO: 481512 - DNA, 240 bp, Homo sapiens; identical to SEQ ID NO: 474043
  chr2:207308960-207309200
  hypo
  upper_gi vs. anorectal,uterine,head_and_neck,melanoma, prostate,bladder_and_urothelial,myeloid_neoplasm,cervical, sarcoma,thyroid,non_cancer

SEQ ID NO: 481513 - DNA, 323 bp, Homo sapiens; identical to SEQ ID NO: 376525
  chr2:208696085-208696408
  hypo
  upper_gi vs. liver_bileduct

SEQ ID NO: 481514 - DNA, 237 bp, Homo sapiens; identical to SEQ ID NO: 459601
  chr2:225906168-225906405
  hypo
  upper_gi vs. lymphoid_neoplasm,cervical,prostate, non_cancer,myeloid_neoplasm,thyroid,sarcoma,multiple_myeloma, breast,melanoma,renal,lung,ovary

SEQ ID NO: 481515 - DNA, 77 bp, Homo sapiens; identical to SEQ ID NO: 454345
  chr2:225906328-225906405
  hypo
  upper_gi vs. lymphoid_neoplasm,non_cancer,cervical, myeloid_neoplasm,prostate,thyroid,breast,melanoma,renal, multiple_myeloma,sarcoma,ovary,lung,uterine,anorectal

SEQ ID NO: 481516 - DNA, 209 bp, Homo sapiens; identical to SEQ ID NO: 353265
  chr2:241157300-241157509
  hypo
  upper_gi vs. melanoma,lymphoid_neoplasm,renal,sarcoma

SEQ ID NO: 481517 - DNA, 241 bp, Homo sapiens; identical to SEQ ID NO: 345785
  chr2:242436503-242436744
  hypo
  upper_gi vs. liver_bileduct

SEQ ID NO: 481518 - DNA, 146 bp, Homo sapiens; identical to SEQ ID NO: 465469
  chr2:242523762-242523908
  hypo
  upper_gi vs. lymphoid_neoplasm

SEQ ID NO: 481519 - DNA, 223 bp, Homo sapiens; identical to SEQ ID NO: 465470
  chr2:242524147-242524370
  hypo
  upper_gi vs. lymphoid_neoplasm

SEQ ID NO: 481520 - DNA, 102 bp, Homo sapiens; identical to SEQ ID NO: 465477
  chr20:400915-401017
  hypo
  upper_gi vs. melanoma

SEQ ID NO: 481521 - DNA, 414 bp, Homo sapiens; identical to SEQ ID NO: 347652
  chr20:4804008-4804422
  hypo
  upper_gi vs. lymphoid_neoplasm,bladder_and_urothelial, melanoma,multiple_myeloma,non_cancer,ovary,uterine,thyroid, sarcoma

SEQ ID NO: 481522 - DNA, 390 bp, Homo sapiens; identical to SEQ ID NO: 455936
  chr20:37433723-37434113
  hypo
  upper_gi vs. ovary,multiple_myeloma, bladder_and_urothelial,lymphoid_neoplasm,cervical,uterine

SEQ ID NO: 481523 - DNA, 27 bp, Homo sapiens
  chr20:37434086-37434113
  hypo
  upper_gi vs. ovary,bladder_and_urothelial, multiple_myeloma,uterine,lymphoid_neoplasm,myeloid_neoplasm, non_cancer,prostate,thyroid,cervical
cggggtgggggttaggaaaactatttt

SEQ ID NO: 481524 - DNA, 62 bp, Homo sapiens; identical to SEQ ID NO: 349032
  chr20:49218808-49218870
  hypo
  upper_gi vs. liver_bileduct

SEQ ID NO: 481525 - DNA, 136 bp, Homo sapiens; identical to SEQ ID NO: 459635
  chr20:55206463-55206599
  hypo
  upper_gi vs. cervical

SEQ ID NO: 481526 - DNA, 4 bp, Homo sapiens
  chr20:55206736-55206740
  hypo
  upper_gi vs. cervical
cgag

SEQ ID NO: 481527 - DNA, 95 bp, Homo sapiens; identical to SEQ ID NO: 352515
  chr20:55206774-55206869
  hypo
  upper_gi vs. cervical

SEQ ID NO: 481528 - DNA, 37 bp, Homo sapiens; identical to SEQ ID NO: 455120
  chr20:60502550-60502587
  hypo
  upper_gi vs. lymphoid_neoplasm

SEQ ID NO: 481529 - DNA, 21 bp, Homo sapiens
  chr20:61506536-61506557
  hypo
  upper_gi vs. lymphoid_neoplasm
gtgaattcatcggggagcccc

SEQ ID NO: 481530 - DNA, 248 bp, Homo sapiens; identical to SEQ ID NO: 459641
  chr20:61810310-61810558
  hypo
  upper_gi vs. melanoma

SEQ ID NO: 481531 - DNA, 211 bp, Homo sapiens; identical to SEQ ID NO: 459651
  chr20:62694767-62694978
  hypo
  upper_gi vs. pancreas_gallbladder

SEQ ID NO: 481532 - DNA, 252 bp, Homo sapiens; identical to SEQ ID NO: 459652
  chr20:62694767-62695019
  hypo
  upper_gi vs. pancreas_gallbladder

SEQ ID NO: 481533 - DNA, 197 bp, Homo sapiens; identical to SEQ ID NO: 352536
  chr20:62695048-62695245
  hypo
  upper_gi vs. pancreas_gallbladder

SEQ ID NO: 481534 - DNA, 123 bp, Homo sapiens; identical to SEQ ID NO: 457941
  chr21:27011487-27011610
  hypo
  upper_gi vs. uterine,lymphoid_neoplasm,sarcoma, multiple_myeloma,breast,myeloid_neoplasm,non_cancer, head_and_neck,thyroid,ovary,prostate

SEQ ID NO: 481535 - DNA, 134 bp, Homo sapiens; identical to SEQ ID NO: 457942
  chr21:27011639-27011773
  hypo
  upper_gi vs. uterine,lymphoid_neoplasm,sarcoma, multiple_myeloma,breast,myeloid_neoplasm,non_cancer, head_and_neck,thyroid,ovary,prostate

SEQ ID NO: 481536 - DNA, 96 bp, Homo sapiens; identical to SEQ ID NO: 455171
  chr21:47565081-47565177
  hypo
  upper_gi vs. lymphoid_neoplasm,liver_bileduct

SEQ ID NO: 481537 - DNA, 337 bp, Homo sapiens; identical to SEQ ID NO: 383361
  chr21:47565270-47565607
  hypo
  upper_gi vs. lymphoid_neoplasm,liver_bileduct

SEQ ID NO: 481538 - DNA, 19 bp, Homo sapiens
  chr21:47602441-47602460
  hypo
  upper_gi vs. liver_bileduct
cgcatcagggagctggccg

SEQ ID NO: 481539 - DNA, 384 bp, Homo sapiens; identical to SEQ ID NO: 349095
  chr21:47602705-47603089
  hypo
  upper_gi vs. liver_bileduct

SEQ ID NO: 481540 - DNA, 187 bp, Homo sapiens; identical to SEQ ID NO: 295268
  chr22:24552924-24553111
  hypo
  upper_gi vs. melanoma,anorectal,pancreas_gallbladder, lymphoid_neoplasm,cervical,liver_bileduct,sarcoma,breast, bladder_and_urothelial,non_cancer,multiple_myeloma, myeloid_neoplasm

SEQ ID NO: 481541 - DNA, 300 bp, Homo sapiens; identical to SEQ ID NO: 480765
  chr22:27068622-27068922
  hypo
  upper_gi vs. pancreas_gallbladder

SEQ ID NO: 481542 - DNA, 64 bp, Homo sapiens; identical to SEQ ID NO: 480768
  chr22:29075343-29075407
  hypo
  upper_gi vs. cervical,lung,renal,ovary,uterine,breast, head_and_neck,sarcoma,melanoma

SEQ ID NO: 481543 - DNA, 321 bp, Homo sapiens; identical to SEQ ID NO: 480769
  chr22:39549067-39549388
  hypo
  upper_gi vs. cervical

SEQ ID NO: 481544 - DNA, 137 bp, Homo sapiens; identical to SEQ ID NO: 352610
  chr22:39549472-39549609
  hypo
  upper_gi vs. cervical

SEQ ID NO: 481545 - DNA, 32 bp, Homo sapiens; identical to SEQ ID NO: 459669
  chr22:39853626-39853658
  hypo
  upper_gi vs. bladder_and_urothelial,ovary, pancreas_gallbladder,anorectal,cervical,prostate,head_and_neck

SEQ ID NO: 481546 - DNA, 56 bp, Homo sapiens; identical to SEQ ID NO: 459670
  chr22:39853690-39853746
  hypo
  upper_gi vs. bladder_and_urothelial,ovary, pancreas_gallbladder,anorectal,cervical,prostate,head_and_neck

SEQ ID NO: 481547 - DNA, 32 bp, Homo sapiens; identical to SEQ ID NO: 459669
  chr22:39853626-39853658
  hypo
  upper_gi vs. bladder_and_urothelial,ovary, pancreas_gallbladder,anorectal,cervical,prostate,head_and_neck, lymphoid_neoplasm

SEQ ID NO: 481548 - DNA, 210 bp, Homo sapiens; identical to SEQ ID NO: 459673
  chr22:39853690-39853900
  hypo
  upper_gi vs. bladder_and_urothelial,ovary, pancreas_gallbladder,anorectal,cervical,prostate,head_and_neck, lymphoid_neoplasm

SEQ ID NO: 481549 - DNA, 130 bp, Homo sapiens; identical to SEQ ID NO: 345661
  chr22:39853934-39854064
  hypo
  upper_gi vs. bladder_and_urothelial,ovary, pancreas_gallbladder,anorectal,cervical,prostate,head_and_neck, lymphoid_neoplasm

SEQ ID NO: 481550 - DNA, 33 bp, Homo sapiens; identical to SEQ ID NO: 453905
  chr22:42667137-42667170
  hypo
  upper_gi vs. lymphoid_neoplasm

SEQ ID NO: 481551 - DNA, 177 bp, Homo sapiens; identical to SEQ ID NO: 462796
  chr22:45405768-45405945
  hypo
  upper_gi vs. cervical

SEQ ID NO: 481552 - DNA, 177 bp, Homo sapiens; identical to SEQ ID NO: 462796
  chr22:45405768-45405945
  hypo
  upper_gi vs. anorectal

SEQ ID NO: 481553 - DNA, 178 bp, Homo sapiens; identical to SEQ ID NO: 362097
  chr22:45406385-45406563
  hypo
  upper_gi vs. anorectal

SEQ ID NO: 481554 - DNA, 125 bp, Homo sapiens
  chr3:12596394-12596519
  hypo
  upper_gi vs. pancreas_gallbladder
cgggaactaaattgacaggagactgagacttttcactttacgcttttaaaatatttgaacataataacgttcagatcgtgaatgtattccataaagaatgagataagctgaattttaaaaataag

SEQ ID NO: 481555 - DNA, 2 bp, Homo sapiens
  chr3:12596544-12596546
  hypo
  upper_gi vs. pancreas_gallbladder
tc

SEQ ID NO: 481556 - DNA, 78 bp, Homo sapiens; identical to SEQ ID NO: 345081
  chr3:16555426-16555504
  hypo
  upper_gi vs. anorectal,lung,lymphoid_neoplasm,ovary, multiple_myeloma,bladder_and_urothelial,renal,sarcoma, liver_bileduct,non_cancer,breast,myeloid_neoplasm,head_and_neck, thyroid,uterine

SEQ ID NO: 481557 - DNA, 241 bp, Homo sapiens; identical to SEQ ID NO: 480787
  chr3:36985571-36985812
  hypo
  upper_gi vs. pancreas_gallbladder,liver_bileduct

SEQ ID NO: 481558 - DNA, 333 bp, Homo sapiens; identical to SEQ ID NO: 455208
  chr3:53032401-53032734
  hypo
  upper_gi vs. head_and_neck,lymphoid_neoplasm,sarcoma, prostate,renal,breast,melanoma

SEQ ID NO: 481559 - DNA, 281 bp, Homo sapiens; identical to SEQ ID NO: 467226
  chr3:98619774-98620055
  hypo
  upper_gi vs. pancreas_gallbladder,colorectal, liver_bileduct,lung,head_and_neck,cervical,melanoma

SEQ ID NO: 481560 - DNA, 58 bp, Homo sapiens; identical to SEQ ID NO: 345096
  chr3:98621126-98621184
  hypo
  upper_gi vs. pancreas_gallbladder,colorectal, liver_bileduct,lung,head_and_neck

SEQ ID NO: 481561 - DNA, 60 bp, Homo sapiens; identical to SEQ ID NO: 229708
  chr3:120627258-120627318
  hypo
  upper_gi vs. colorectal

SEQ ID NO: 481562 - DNA, 60 bp, Homo sapiens; identical to SEQ ID NO: 229708
  chr3:120627258-120627318
  hypo
  upper_gi vs. colorectal

SEQ ID NO: 481563 - DNA, 277 bp, Homo sapiens; identical to SEQ ID NO: 480806
  chr3:123168265-123168542
  hypo
  upper_gi vs. pancreas_gallbladder

SEQ ID NO: 481564 - DNA, 22 bp, Homo sapiens
  chr3:139258159-139258181
  hypo
  upper_gi vs. pancreas_gallbladder
cgaggacgccctttctggcgtc

SEQ ID NO: 481565 - DNA, 267 bp, Homo sapiens; identical to SEQ ID NO: 349830
  chr3:139258672-139258939
  hypo
  upper_gi vs. pancreas_gallbladder

SEQ ID NO: 481566 - DNA, 124 bp, Homo sapiens; identical to SEQ ID NO: 455226
  chr3:141174173-141174297
  hypo
  upper_gi vs. melanoma

SEQ ID NO: 481567 - DNA, 8 bp, Homo sapiens
  chr3:141174671-141174679
  hypo
  upper_gi vs. melanoma
gtttcagc

SEQ ID NO: 481568 - DNA, 15 bp, Homo sapiens
  chr3:142837817-142837832
  hypo
  upper_gi vs. ovary,uterine,renal,lymphoid_neoplasm, multiple_myeloma,myeloid_neoplasm,non_cancer,melanoma, bladder_and_urothelial,thyroid
cgggacaagtatttt

SEQ ID NO: 481569 - DNA, 86 bp, Homo sapiens; identical to SEQ ID NO: 458017
  chr3:150802802-150802888
  hypo
  upper_gi vs. lung,breast,multiple_myeloma, bladder_and_urothelial,uterine,pancreas_gallbladder,ovary, prostate,myeloid_neoplasm

SEQ ID NO: 481570 - DNA, 70 bp, Homo sapiens; identical to SEQ ID NO: 357722
  chr3:150805097-150805167
  hypo
  upper_gi vs. uterine,myeloid_neoplasm, bladder_and_urothelial,breast,prostate,thyroid

SEQ ID NO: 481571 - DNA, 54 bp, Homo sapiens; identical to SEQ ID NO: 345815
  chr3:169540679-169540733
  hypo
  upper_gi vs. sarcoma,melanoma,renal,lymphoid_neoplasm, non_cancer

SEQ ID NO: 481572 - DNA, 133 bp, Homo sapiens; identical to SEQ ID NO: 453234
  chr3:186079331-186079464
  hypo
  upper_gi vs. lymphoid_neoplasm

SEQ ID NO: 481573 - DNA, 291 bp, Homo sapiens; identical to SEQ ID NO: 453235
  chr3:186079331-186079622
  hypo
  upper_gi vs. myeloid_neoplasm,lymphoid_neoplasm,thyroid, prostate,multiple_myeloma,non_cancer,sarcoma

SEQ ID NO: 481574 - DNA, 125 bp, Homo sapiens; identical to SEQ ID NO: 453236
  chr3:186079497-186079622
  hypo
  upper_gi vs. ovary,multiple_myeloma,pancreas_gallbladder, lymphoid_neoplasm

SEQ ID NO: 481575 - DNA, 296 bp, Homo sapiens; identical to SEQ ID NO: 338312
  chr3:194786359-194786655
  hypo
  upper_gi vs. colorectal

SEQ ID NO: 481576 - DNA, 25 bp, Homo sapiens
  chr4:10459327-10459352
  hypo
  upper_gi vs. anorectal,prostate,breast,non_cancer, uterine,head_and_neck,cervical,sarcoma,thyroid
gggtcccgcggagggcggccttggc

SEQ ID NO: 481577 - DNA, 16 bp, Homo sapiens
  chr4:41259850-41259866
  hypo
  upper_gi vs. cervical
aggtgatgcggggcgc

SEQ ID NO: 481578 - DNA, 94 bp, Homo sapiens; identical to SEQ ID NO: 458065
  chr4:57687545-57687639
  hypo
  upper_gi vs. colorectal,lung,anorectal,ovary, head_and_neck,bladder_and_urothelial

SEQ ID NO: 481579 - DNA, 140 bp, Homo sapiens; identical to SEQ ID NO: 474166
  chr4:111543735-111543875
  hypo
  upper_gi vs. colorectal

SEQ ID NO: 481580 - DNA, 233 bp, Homo sapiens; identical to SEQ ID NO: 461074
  chr4:111543735-111543968
  hypo
  upper_gi vs. colorectal

SEQ ID NO: 481581 - DNA, 61 bp, Homo sapiens; identical to SEQ ID NO: 461075
  chr4:111543907-111543968
  hypo
  upper_gi vs. colorectal

SEQ ID NO: 481582 - DNA, 243 bp, Homo sapiens; identical to SEQ ID NO: 462856
  chr4:113436585-113436828
  hypo
  upper_gi vs. sarcoma,uterine,cervical,ovary,thyroid, head_and_neck,non_cancer,lymphoid_neoplasm,breast, bladder_and_urothelial,prostate,myeloid_neoplasm

SEQ ID NO: 481583 - DNA, 243 bp, Homo sapiens; identical to SEQ ID NO: 462856
  chr4:113436585-113436828
  hypo
  upper_gi vs. anorectal,head_and_neck,cervical,renal, breast,ovary,uterine,sarcoma,colorectal,prostate,lung, lymphoid_neoplasm

SEQ ID NO: 481584 - DNA, 113 bp, Homo sapiens; identical to SEQ ID NO: 462859
  chr4:113438278-113438391
  hypo
  upper_gi vs. bladder_and_urothelial

SEQ ID NO: 481585 - DNA, 229 bp, Homo sapiens; identical to SEQ ID NO: 464557
  chr4:113438278-113438507
  hypo
  upper_gi vs. bladder_and_urothelial

SEQ ID NO: 481586 - DNA, 61 bp, Homo sapiens; identical to SEQ ID NO: 459713
  chr4:142054594-142054655
  hypo
  upper_gi vs. ovary,liver_bileduct

SEQ ID NO: 481587 - DNA, 155 bp, Homo sapiens; identical to SEQ ID NO: 357972
  chr4:142054757-142054912
  hypo
  upper_gi vs. ovary,liver_bileduct

SEQ ID NO: 481588 - DNA, 829 bp, Homo sapiens; identical to SEQ ID NO: 346671
  chr5:472600-473429
  hypo
  upper_gi vs. liver_bileduct,pancreas_gallbladder

SEQ ID NO: 481589 - DNA, 966 bp, Homo sapiens; identical to SEQ ID NO: 469215
  chr5:472934-473900
  hypo
  upper_gi vs. liver_bileduct,pancreas_gallbladder

SEQ ID NO: 481590 - DNA, 829 bp, Homo sapiens; identical to SEQ ID NO: 469216
  chr5:473431-474260
  hypo
  upper_gi vs. liver_bileduct

SEQ ID NO: 481591 - DNA, 161 bp, Homo sapiens; identical to SEQ ID NO: 473338
  chr5:600977-601138
  hypo
  upper_gi vs. lymphoid_neoplasm,cervical

SEQ ID NO: 481592 - DNA, 263 bp, Homo sapiens; identical to SEQ ID NO: 353539
  chr5:601222-601485
  hypo
  upper_gi vs. lymphoid_neoplasm,cervical

SEQ ID NO: 481593 - DNA, 171 bp, Homo sapiens; identical to SEQ ID NO: 456015
  chr5:10564301-10564472
  hypo
  upper_gi vs. lymphoid_neoplasm,cervical,myeloid_neoplasm, thyroid,non_cancer,renal,ovary,sarcoma,head_and_neck, multiple_myeloma

SEQ ID NO: 481594 - DNA, 53 bp, Homo sapiens; identical to SEQ ID NO: 462874
  chr5:17217629-17217682
  hypo
  upper_gi vs. lymphoid_neoplasm,anorectal

SEQ ID NO: 481595 - DNA, 278 bp, Homo sapiens; identical to SEQ ID NO: 467441
  chr5:42424338-42424616
  hypo
  upper_gi vs. anorectal,colorectal,breast,renal

SEQ ID NO: 481596 - DNA, 117 bp, Homo sapiens; identical to SEQ ID NO: 459731
  chr5:76506029-76506146
  hypo
  upper_gi vs. breast,anorectal

SEQ ID NO: 481597 - DNA, 96 bp, Homo sapiens; identical to SEQ ID NO: 358151
  chr5:76507202-76507298
  hypo
  upper_gi vs. ovary,bladder_and_urothelial,breast

SEQ ID NO: 481598 - DNA, 38 bp, Homo sapiens; identical to SEQ ID NO: 456033
  chr5:77268330-77268368
  hypo
  upper_gi vs. myeloid_neoplasm,thyroid,ovary,non_cancer

SEQ ID NO: 481599 - DNA, 42 bp, Homo sapiens; identical to SEQ ID NO: 462893
  chr5:79865662-79865704
  hypo
  upper_gi vs. sarcoma,uterine

SEQ ID NO: 481600 - DNA, 91 bp, Homo sapiens; identical to SEQ ID NO: 462894
  chr5:79865744-79865835
  hypo
  upper_gi vs. sarcoma,uterine

SEQ ID NO: 481601 - DNA, 1 bp, Homo sapiens
  chr5:126339372-126339373
  hypo
  upper_gi vs. head_and_neck,lymphoid_neoplasm
c

SEQ ID NO: 481602 - DNA, 391 bp, Homo sapiens; identical to SEQ ID NO: 338801
  chr5:135091190-135091581
  hypo
  upper_gi vs. colorectal

SEQ ID NO: 481603 - DNA, 1 bp, Homo sapiens
  chr5:136835144-136835145
  hypo
  upper_gi vs. bladder_and_urothelial,anorectal,melanoma, lung,uterine
c

SEQ ID NO: 481604 - DNA, 283 bp, Homo sapiens; identical to SEQ ID NO: 459751
  chr5:142782217-142782500
  hypo
  upper_gi vs. pancreas_gallbladder

SEQ ID NO: 481605 - DNA, 125 bp, Homo sapiens; identical to SEQ ID NO: 459752
  chr5:142782625-142782750
  hypo
  upper_gi vs. pancreas_gallbladder

SEQ ID NO: 481606 - DNA, 410 bp, Homo sapiens; identical to SEQ ID NO: 345197
  chr5:142782794-142783204
  hypo
  upper_gi vs. pancreas_gallbladder

SEQ ID NO: 481607 - DNA, 718 bp, Homo sapiens; identical to SEQ ID NO: 454427
  chr5:142783958-142784676
  hypo
  upper_gi vs. liver_bileduct,pancreas_gallbladder,lung

SEQ ID NO: 481608 - DNA, 215 bp, Homo sapiens; identical to SEQ ID NO: 454428
  chr5:142784461-142784676
  hypo
  upper_gi vs. liver_bileduct,pancreas_gallbladder

SEQ ID NO: 481609 - DNA, 290 bp, Homo sapiens; identical to SEQ ID NO: 346761
  chr5:157002817-157003107
  hypo
  upper_gi vs. bladder_and_urothelial,multiple_myeloma, head_and_neck,lymphoid_neoplasm,sarcoma,uterine,lung,colorectal, ovary,non_cancer,prostate,cervical,renal,thyroid,liver_bileduct

SEQ ID NO: 481610 - DNA, 210 bp, Homo sapiens; identical to SEQ ID NO: 458169
  chr5:176057164-176057374
  hypo
  upper_gi vs. head_and_neck

SEQ ID NO: 481611 - DNA, 24 bp, Homo sapiens
  chr5:177031080-177031104
  hypo
  upper_gi vs. head_and_neck
cgagttatgtgcagcctcctcgtg

SEQ ID NO: 481612 - DNA, 18 bp, Homo sapiens
  chr5:177031565-177031583
  hypo
  upper_gi vs. head_and_neck
ccctcggcacccctgccc

SEQ ID NO: 481613 - DNA, 1 bp, Homo sapiens
  chr5:179448856-179448857
  hypo
  upper_gi vs. pancreas_gallbladder
c

SEQ ID NO: 481614 - DNA, 205 bp, Homo sapiens; identical to SEQ ID NO: 305254
  chr5:179448886-179449091
  hypo
  upper_gi vs. pancreas_gallbladder

SEQ ID NO: 481615 - DNA, 244 bp, Homo sapiens; identical to SEQ ID NO: 467515
  chr5:179498011-179498255
  hypo
  upper_gi vs. liver_bileduct

SEQ ID NO: 481616 - DNA, 505 bp, Homo sapiens; identical to SEQ ID NO: 467516
  chr5:179498363-179498868
  hypo
  upper_gi vs. liver_bileduct

SEQ ID NO: 481617 - DNA, 55 bp, Homo sapiens; identical to SEQ ID NO: 346767
  chr6:393764-393819
  hypo
  upper_gi vs. lymphoid_neoplasm,melanoma,myeloid_neoplasm

SEQ ID NO: 481618 - DNA, 120 bp, Homo sapiens; identical to SEQ ID NO: 480966
  chr6:6546401-6546521
  hypo
  upper_gi vs. bladder_and_urothelial,breast

SEQ ID NO: 481619 - DNA, 90 bp, Homo sapiens; identical to SEQ ID NO: 350270
  chr6:6547222-6547312
  hypo
  upper_gi vs. bladder_and_urothelial,breast

SEQ ID NO: 481620 - DNA, 78 bp, Homo sapiens; identical to SEQ ID NO: 459764
  chr6:11043624-11043702
  hypo
  upper_gi vs. liver_bileduct,ovary,uterine,prostate, head_and_neck,renal,breast

SEQ ID NO: 481621 - DNA, 52 bp, Homo sapiens
  chr6:34170817-34170869
  hypo
cgatccgcagccacagtttgggtggctgtagccccgcccaagagggcggggc

SEQ ID NO: 481622 - DNA, 462 bp, Homo sapiens; identical to SEQ ID NO: 358502
  chr6:37665241-37665703
  hypo
  upper_gi vs. pancreas_gallbladder

SEQ ID NO: 481623 - DNA, 295 bp, Homo sapiens; identical to SEQ ID NO: 453385
  chr6:69344649-69344944
  hypo
  upper_gi vs. lung

SEQ ID NO: 481624 - DNA, 295 bp, Homo sapiens; identical to SEQ ID NO: 453385
  chr6:69344649-69344944
  hypo
  upper_gi vs. lung,melanoma

SEQ ID NO: 481625 - DNA, 223 bp, Homo sapiens; identical to SEQ ID NO: 458206
  chr6:71665723-71665946
  hypo
  upper_gi vs. pancreas_gallbladder,lung,liver_bileduct, head_and_neck,ovary,bladder_and_urothelial

SEQ ID NO: 481626 - DNA, 9 bp, Homo sapiens
  chr6:73333099-73333108
  hypo
  upper_gi vs. head_and_neck,lung,breast,anorectal,thyroid, lymphoid_neoplasm,multiple_myeloma,prostate
ttgtggcgc

SEQ ID NO: 481627 - DNA, 83 bp, Homo sapiens; identical to SEQ ID NO: 350409
  chr6:80657600-80657683
  hypo
  upper_gi vs. anorectal,sarcoma,melanoma, bladder_and_urothelial,breast,head_and_neck,thyroid

SEQ ID NO: 481628 - DNA, 305 bp, Homo sapiens; identical to SEQ ID NO: 480990
  chr6:90121293-90121598
  hypo
  upper_gi vs. lung,pancreas_gallbladder,liver_bileduct, cervical,melanoma

SEQ ID NO: 481629 - DNA, 305 bp, Homo sapiens; identical to SEQ ID NO: 480990
  chr6:90121293-90121598
  hypo
  upper_gi vs. pancreas_gallbladder,lung,cervical, liver_bileduct,melanoma,head_and_neck,ovary,anorectal

SEQ ID NO: 481630 - DNA, 256 bp, Homo sapiens; identical to SEQ ID NO: 459784
  chr6:90142647-90142903
  hypo
  upper_gi vs. pancreas_gallbladder,liver_bileduct,lung

SEQ ID NO: 481631 - DNA, 372 bp, Homo sapiens; identical to SEQ ID NO: 346840
  chr6:91005702-91006074
  hypo
  upper_gi vs. head_and_neck,cervical,anorectal,prostate, lymphoid_neoplasm,uterine,liver_bileduct,non_cancer, bladder_and_urothelial,thyroid,multiple_myeloma,ovary,lung

SEQ ID NO: 481632 - DNA, 874 bp, Homo sapiens; identical to SEQ ID NO: 480997
  chr6:91005702-91006576
  hypo
  upper_gi vs. liver_bileduct,lymphoid_neoplasm

SEQ ID NO: 481633 - DNA, 440 bp, Homo sapiens; identical to SEQ ID NO: 453397
  chr6:127836226-127836666
  hypo
  upper_gi vs. lung

SEQ ID NO: 481634 - DNA, 225 bp, Homo sapiens; identical to SEQ ID NO: 453398
  chr6:127836441-127836666
  hypo
  upper_gi vs. lung

SEQ ID NO: 481635 - DNA, 31 bp, Homo sapiens; identical to SEQ ID NO: 350458
  chr6:127837749-127837780
  hypo
  upper_gi vs. lung

SEQ ID NO: 481636 - DNA, 69 bp, Homo sapiens; identical to SEQ ID NO: 358678
  chr6:151562596-151562665
  hypo
  upper_gi vs. pancreas_gallbladder,cervical

SEQ ID NO: 481637 - DNA, 16 bp, Homo sapiens
  chr6:152623493-152623509
  hypo
  upper_gi vs. liver_bileduct
ggaatcatgaacttcc

SEQ ID NO: 481638 - DNA, 41 bp, Homo sapiens; identical to SEQ ID NO: 346866
  chr6:159591277-159591318
  hypo
  upper_gi vs. sarcoma,prostate,myeloid_neoplasm,thyroid, renal

SEQ ID NO: 481639 - DNA, 205 bp, Homo sapiens; identical to SEQ ID NO: 459809
  chr6:163837231-163837436
  hypo
  upper_gi vs. liver_bileduct,pancreas_gallbladder

SEQ ID NO: 481640 - DNA, 239 bp, Homo sapiens; identical to SEQ ID NO: 459810
  chr6:163837231-163837470
  hypo
  upper_gi vs. liver_bileduct

SEQ ID NO: 481641 - DNA, 106 bp, Homo sapiens; identical to SEQ ID NO: 460454
  chr6:167834910-167835016
  hypo
  upper_gi vs. lymphoid_neoplasm

SEQ ID NO: 481642 - DNA, 85 bp, Homo sapiens; identical to SEQ ID NO: 473389
  chr6:167836474-167836559
  hypo
  upper_gi vs. liver_bileduct

SEQ ID NO: 481643 - DNA, 305 bp, Homo sapiens; identical to SEQ ID NO: 377854
  chr6:167836629-167836934
  hypo
  upper_gi vs. liver_bileduct

SEQ ID NO: 481644 - DNA, 59 bp, Homo sapiens; identical to SEQ ID NO: 460460
  chr7:834245-834304
  hypo
  upper_gi vs. lymphoid_neoplasm,melanoma

SEQ ID NO: 481645 - DNA, 317 bp, Homo sapiens; identical to SEQ ID NO: 353881
  chr7:834873-835190
  hypo
  upper_gi vs. lymphoid_neoplasm,melanoma

SEQ ID NO: 481646 - DNA, 95 bp, Homo sapiens; identical to SEQ ID NO: 346873
  chr7:1705153-1705248
  hypo
  upper_gi vs. melanoma

SEQ ID NO: 481647 - DNA, 234 bp, Homo sapiens; identical to SEQ ID NO: 474310
  chr7:1705153-1705387
  hypo
  upper_gi vs. melanoma,lung,sarcoma,breast

SEQ ID NO: 481648 - DNA, 60 bp, Homo sapiens; identical to SEQ ID NO: 474311
  chr7:1705693-1705753
  hypo
  upper_gi vs. melanoma,lung,sarcoma,breast

SEQ ID NO: 481649 - DNA, 121 bp, Homo sapiens; identical to SEQ ID NO: 459812
  chr7:1705266-1705387
  hypo
  upper_gi vs. sarcoma,head_and_neck, bladder_and_urothelial

SEQ ID NO: 481650 - DNA, 503 bp, Homo sapiens; identical to SEQ ID NO: 459813
  chr7:1705693-1706196
  hypo
  upper_gi vs. sarcoma,head_and_neck, bladder_and_urothelial

SEQ ID NO: 481651 - DNA, 435 bp, Homo sapiens; identical to SEQ ID NO: 481033
  chr7:1705761-1706196
  hypo

SEQ ID NO: 481652 - DNA, 20 bp, Homo sapiens
  chr7:1706733-1706753
  hypo
cattttccctcttcgatctc

SEQ ID NO: 481653 - DNA, 48 bp, Homo sapiens; identical to SEQ ID NO: 378018
  chr7:2686911-2686959
  hypo
  upper_gi vs. liver_bileduct

SEQ ID NO: 481654 - DNA, 3 bp, Homo sapiens
  chr7:6525091-6525094
  hypo
  upper_gi vs. lymphoid_neoplasm
ttc

SEQ ID NO: 481655 - DNA, 63 bp, Homo sapiens; identical to SEQ ID NO: 481035
  chr7:6655356-6655419
  hypo
  upper_gi vs. lung,anorectal

SEQ ID NO: 481656 - DNA, 221 bp, Homo sapiens; identical to SEQ ID NO: 481036
  chr7:6655448-6655669
  hypo
  upper_gi vs. lung,anorectal

SEQ ID NO: 481657 - DNA, 153 bp, Homo sapiens; identical to SEQ ID NO: 358745
  chr7:6655854-6656007
  hypo
  upper_gi vs. lung,anorectal

SEQ ID NO: 481658 - DNA, 60 bp, Homo sapiens; identical to SEQ ID NO: 454474
  chr7:19156644-19156704
  hypo
  upper_gi vs. melanoma,prostate,anorectal,sarcoma,uterine, head_and_neck,myeloid_neoplasm,breast,ovary,multiple_myeloma, cervical,thyroid,non_cancer

SEQ ID NO: 481659 - DNA, 60 bp, Homo sapiens; identical to SEQ ID NO: 454474
  chr7:19156644-19156704
  hypo
  upper_gi vs. anorectal,uterine,breast,head_and_neck, sarcoma,prostate,myeloid_neoplasm,non_cancer,thyroid

SEQ ID NO: 481660 - DNA, 86 bp, Homo sapiens; identical to SEQ ID NO: 481041
  chr7:20817295-20817381
  hypo
  upper_gi vs. colorectal

SEQ ID NO: 481661 - DNA, 128 bp, Homo sapiens; identical to SEQ ID NO: 481042
  chr7:20817410-20817538
  hypo
  upper_gi vs. colorectal

SEQ ID NO: 481662 - DNA, 210 bp, Homo sapiens; identical to SEQ ID NO: 456111
  chr7:23052818-23053028
  hypo
  upper_gi vs. lung,bladder_and_urothelial, lymphoid_neoplasm,melanoma,liver_bileduct,head_and_neck,ovary, anorectal,renal,multiple_myeloma

SEQ ID NO: 481663 - DNA, 595 bp, Homo sapiens; identical to SEQ ID NO: 346883
  chr7:23053080-23053675
  hypo
  upper_gi vs. lung,bladder_and_urothelial, lymphoid_neoplasm,melanoma,liver_bileduct,head_and_neck,ovary, anorectal,renal,multiple_myeloma

SEQ ID NO: 481664 - DNA, 599 bp, Homo sapiens; identical to SEQ ID NO: 456113
  chr7:23053195-23053794
  hypo
  upper_gi vs. liver_bileduct,lymphoid_neoplasm,lung, pancreas_gallbladder,bladder_and_urothelial,melanoma

SEQ ID NO: 481665 - DNA, 246 bp, Homo sapiens; identical to SEQ ID NO: 350530
  chr7:23053819-23054065
  hypo
  upper_gi vs. liver_bileduct,lymphoid_neoplasm,lung, pancreas_gallbladder,bladder_and_urothelial,melanoma

SEQ ID NO: 481666 - DNA, 134 bp, Homo sapiens; identical to SEQ ID NO: 472316
  chr7:23749573-23749707
  hypo
  upper_gi vs. bladder_and_urothelial,head_and_neck,lung, melanoma,liver_bileduct,lymphoid_neoplasm

SEQ ID NO: 481667 - DNA, 364 bp, Homo sapiens; identical to SEQ ID NO: 353951
  chr7:23749829-23750193
  hypo
  upper_gi vs. bladder_and_urothelial,head_and_neck,lung, melanoma,liver_bileduct,lymphoid_neoplasm

SEQ ID NO: 481668 - DNA, 7 bp, Homo sapiens
  chr7:37487365-37487372
  hypo
  upper_gi vs. ovary,lymphoid_neoplasm,uterine,thyroid, myeloid_neoplasm,non_cancer,multiple_myeloma,breast,prostate, sarcoma,renal,liver_bileduct,melanoma,lung
cgctcgc

SEQ ID NO: 481669 - DNA, 168 bp, Homo sapiens; identical to SEQ ID NO: 345273
  chr7:37960958-37961126
  hypo
  upper_gi vs. pancreas_gallbladder,liver_bileduct,lung, renal

SEQ ID NO: 481670 - DNA, 81 bp, Homo sapiens; identical to SEQ ID NO: 481064
  chr7:42276904-42276985
  hypo
  upper_gi vs. cervical,head_and_neck,breast,lung, bladder_and_urothelial,ovary,renal,uterine

SEQ ID NO: 481671 - DNA, 409 bp, Homo sapiens; identical to SEQ ID NO: 481065
  chr7:42276904-42277313
  hypo
  upper_gi vs. cervical,head_and_neck,lung,breast,renal, bladder_and_urothelial

SEQ ID NO: 481672 - DNA, 309 bp, Homo sapiens; identical to SEQ ID NO: 481066
  chr7:42277004-42277313
  hypo
  upper_gi vs. anorectal,head_and_neck

SEQ ID NO: 481673 - DNA, 61 bp, Homo sapiens; identical to SEQ ID NO: 481067
  chr7:42277588-42277649
  hypo
  upper_gi vs. anorectal,head_and_neck

SEQ ID NO: 481674 - DNA, 39 bp, Homo sapiens; identical to SEQ ID NO: 459830
  chr7:44364447-44364486
  hypo
  upper_gi vs. anorectal,breast,uterine,prostate, head_and_neck,ovary,bladder_and_urothelial,sarcoma

SEQ ID NO: 481675 - DNA, 27 bp, Homo sapiens
  chr7:44365258-44365285
  hypo
  upper_gi vs. anorectal,breast,uterine,prostate, head_and_neck,ovary,bladder_and_urothelial,sarcoma
caccgccgccgccgccgcgcccgcccc

SEQ ID NO: 481676 - DNA, 369 bp, Homo sapiens; identical to SEQ ID NO: 346904
  chr7:44365258-44365627
  hypo
  upper_gi vs. breast,anorectal,ovary,prostate, head_and_neck,bladder_and_urothelial,sarcoma,uterine

SEQ ID NO: 481677 - DNA, 1 bp, Homo sapiens
  chr7:45613422-45613423
  hypo
  upper_gi vs. bladder_and_urothelial,sarcoma,lung,uterine, prostate,thyroid,multiple_myeloma,breast,anorectal,non_cancer, myeloid_neoplasm
c

SEQ ID NO: 481678 - DNA, 102 bp, Homo sapiens; identical to SEQ ID NO: 345274
  chr7:50344738-50344840
  hypo
  upper_gi vs. anorectal,multiple_myeloma, lymphoid_neoplasm,non_cancer,myeloid_neoplasm,head_and_neck, uterine,thyroid,ovary,cervical,breast,lung

SEQ ID NO: 481679 - DNA, 57 bp, Homo sapiens; identical to SEQ ID NO: 457128
  chr7:50560501-50560558
  hypo
  upper_gi vs. lymphoid_neoplasm

SEQ ID NO: 481680 - DNA, 220 bp, Homo sapiens; identical to SEQ ID NO: 345911
  chr7:50560663-50560883
  hypo
  upper_gi vs. lymphoid_neoplasm

SEQ ID NO: 481681 - DNA, 24 bp, Homo sapiens
  chr7:55145822-55145846
  hypo
  upper_gi vs. head_and_neck
cgtgccgtgttcctgtcctggggt

SEQ ID NO: 481682 - DNA, 619 bp, Homo sapiens; identical to SEQ ID NO: 353990
  chr7:55145980-55146599
  hypo
  upper_gi vs. head_and_neck

SEQ ID NO: 481683 - DNA, 5 bp, Homo sapiens
  chr7:64974264-64974269
  hypo
  upper_gi vs. melanoma,breast,uterine,prostate,sarcoma, liver_bileduct,non_cancer,multiple_myeloma,myeloid_neoplasm, ovary,thyroid,lung,lymphoid_neoplasm,renal, bladder_and_urothelial
cggcg

SEQ ID NO: 481684 - DNA, 61 bp, Homo sapiens; identical to SEQ ID NO: 458263
  chr7:64974448-64974509
  hypo
  upper_gi vs. melanoma,breast,uterine,prostate,sarcoma, liver_bileduct,non_cancer,multiple_myeloma,myeloid_neoplasm, ovary,thyroid,lung,lymphoid_neoplasm,renal, bladder_and_urothelial

SEQ ID NO: 481685 - DNA, 5 bp, Homo sapiens
  chr7:64974988-64974993
  hypo
  upper_gi vs. melanoma,breast,uterine,prostate,sarcoma, liver_bileduct,non_cancer,multiple_myeloma,myeloid_neoplasm, ovary,thyroid,lung,lymphoid_neoplasm,renal, bladder_and_urothelial
tcggc

SEQ ID NO: 481686 - DNA, 157 bp, Homo sapiens; identical to SEQ ID NO: 481078
  chr7:69062203-69062360
  hypo
  upper_gi vs. anorectal,lung,breast,head_and_neck, cervical,ovary,renal,prostate,uterine,bladder_and_urothelial, myeloid_neoplasm,thyroid

SEQ ID NO: 481687 - DNA, 422 bp, Homo sapiens; identical to SEQ ID NO: 459840
  chr7:69063038-69063460
  hypo
  upper_gi vs. anorectal,lung,ovary,head_and_neck,cervical, breast,bladder_and_urothelial,prostate,renal,uterine, myeloid_neoplasm,multiple_myeloma

SEQ ID NO: 481688 - DNA, 420 bp, Homo sapiens; identical to SEQ ID NO: 481080
  chr7:69063040-69063460
  hypo
  upper_gi vs. lung,head_and_neck,bladder_and_urothelial, breast,cervical,uterine,sarcoma,prostate

SEQ ID NO: 481689 - DNA, 319 bp, Homo sapiens; identical to SEQ ID NO: 481081
  chr7:69063552-69063871
  hypo
  upper_gi vs. lung,head_and_neck,bladder_and_urothelial, breast,cervical,uterine,sarcoma,prostate

SEQ ID NO: 481690 - DNA, 98 bp, Homo sapiens; identical to SEQ ID NO: 481082
  chr7:69063900-69063998
  hypo
  upper_gi vs. lung,head_and_neck,bladder_and_urothelial, breast,cervical,uterine,sarcoma,prostate

SEQ ID NO: 481691 - DNA, 319 bp, Homo sapiens; identical to SEQ ID NO: 481081
  chr7:69063552-69063871
  hypo
  upper_gi vs. head_and_neck,breast,cervical,lung,sarcoma, renal,prostate,uterine,bladder_and_urothelial

SEQ ID NO: 481692 - DNA, 283 bp, Homo sapiens; identical to SEQ ID NO: 481084
  chr7:69063900-69064183
  hypo
  upper_gi vs. head_and_neck,breast,cervical,lung,sarcoma, renal,prostate,uterine,bladder_and_urothelial

SEQ ID NO: 481693 - DNA, 130 bp, Homo sapiens; identical to SEQ ID NO: 459841
  chr7:69064053-69064183
  hypo
  upper_gi vs. lung,renal,breast,cervical,prostate,ovary, uterine,bladder_and_urothelial,sarcoma,myeloid_neoplasm, head_and_neck,melanoma,thyroid

SEQ ID NO: 481694 - DNA, 164 bp, Homo sapiens; identical to SEQ ID NO: 463879
  chr7:77324199-77324363
  hypo

SEQ ID NO: 481695 - DNA, 1 bp, Homo sapiens
  chr7:87257895-87257896
  hypo
  upper_gi vs. liver_bileduct,colorectal,renal, bladder_and_urothelial,lung,ovary,breast,uterine, myeloid_neoplasm
c

SEQ ID NO: 481696 - DNA, 45 bp, Homo sapiens; identical to SEQ ID NO: 346914
  chr7:87258398-87258443
  hypo
  upper_gi vs. liver_bileduct,colorectal,lung,breast,renal, uterine

SEQ ID NO: 481697 - DNA, 216 bp, Homo sapiens; identical to SEQ ID NO: 458267
  chr7:87563614-87563830
  hypo
  upper_gi vs. colorectal,pancreas_gallbladder, lymphoid_neoplasm

SEQ ID NO: 481698 - DNA, 637 bp, Homo sapiens; identical to SEQ ID NO: 481092
  chr7:90225109-90225746
  hypo
  upper_gi vs. pancreas_gallbladder

SEQ ID NO: 481699 - DNA, 296 bp, Homo sapiens; identical to SEQ ID NO: 459844
  chr7:90225450-90225746
  hypo
  upper_gi vs. pancreas_gallbladder,liver_bileduct, cervical

SEQ ID NO: 481700 - DNA, 212 bp, Homo sapiens; identical to SEQ ID NO: 459845
  chr7:90226057-90226269
  hypo
  upper_gi vs. pancreas_gallbladder,liver_bileduct, cervical

SEQ ID NO: 481701 - DNA, 212 bp, Homo sapiens; identical to SEQ ID NO: 459845
  chr7:90226057-90226269
  hypo
  upper_gi vs. pancreas_gallbladder,cervical, liver_bileduct

SEQ ID NO: 481702 - DNA, 15 bp, Homo sapiens
  chr7:99156600-99156615
  hypo
  upper_gi vs. liver_bileduct,lymphoid_neoplasm,melanoma, anorectal,cervical,head_and_neck,sarcoma,pancreas_gallbladder, multiple_myeloma,bladder_and_urothelial,renal,non_cancer, thyroid
ccgccgtcaggagcc

SEQ ID NO: 481703 - DNA, 216 bp, Homo sapiens; identical to SEQ ID NO: 456137
  chr7:99156600-99156816
  hypo
  upper_gi vs. melanoma,liver_bileduct,anorectal, pancreas_gallbladder,lymphoid_neoplasm,head_and_neck,sarcoma, cervical,renal,non_cancer,multiple_myeloma, bladder_and_urothelial,thyroid

SEQ ID NO: 481704 - DNA, 77 bp, Homo sapiens; identical to SEQ ID NO: 345277
  chr7:99156982-99157059
  hypo
  upper_gi vs. melanoma,liver_bileduct,anorectal, pancreas_gallbladder,lymphoid_neoplasm,head_and_neck,sarcoma, cervical,renal,non_cancer,multiple_myeloma, bladder_and_urothelial,thyroid

SEQ ID NO: 481705 - DNA, 20 bp, Homo sapiens
  chr7:106684813-106684833
  hypo
  upper_gi vs. lung,bladder_and_urothelial,melanoma,breast, ovary,renal,uterine,prostate
cgggggttcaccatggcgaa

SEQ ID NO: 481706 - DNA, 252 bp, Homo sapiens; identical to SEQ ID NO: 463034
  chr7:106684920-106685172
  hypo
  upper_gi vs. lung,bladder_and_urothelial,melanoma,breast, ovary,renal,uterine,prostate

SEQ ID NO: 481707 - DNA, 408 bp, Homo sapiens; identical to SEQ ID NO: 467694
  chr7:113726962-113727370
  hypo
  upper_gi vs. anorectal

SEQ ID NO: 481708 - DNA, 52 bp, Homo sapiens; identical to SEQ ID NO: 464784
  chr7:126891155-126891207
  hypo
  upper_gi vs. colorectal,multiple_myeloma,cervical, thyroid,non_cancer,anorectal

SEQ ID NO: 481709 - DNA, 265 bp, Homo sapiens; identical to SEQ ID NO: 481118
  chr7:128828640-128828905
  hypo
  upper_gi vs. cervical

SEQ ID NO: 481710 - DNA, 1 bp, Homo sapiens
  chr7:155581242-155581243
  hypo
  upper_gi vs. lymphoid_neoplasm
c

SEQ ID NO: 481711 - DNA, 39 bp, Homo sapiens; identical to SEQ ID NO: 345928
  chr7:155581980-155582019
  hypo
  upper_gi vs. lymphoid_neoplasm

SEQ ID NO: 481712 - DNA, 42 bp, Homo sapiens; identical to SEQ ID NO: 455419
  chr7:157262486-157262528
  hypo
  upper_gi vs. lymphoid_neoplasm,renal

SEQ ID NO: 481713 - DNA, 215 bp, Homo sapiens; identical to SEQ ID NO: 354106
  chr7:157263471-157263686
  hypo
  upper_gi vs. lymphoid_neoplasm

SEQ ID NO: 481714 - DNA, 43 bp, Homo sapiens; identical to SEQ ID NO: 467720
  chr8:495481-495524
  hypo
  upper_gi vs. liver_bileduct

SEQ ID NO: 481715 - DNA, 69 bp, Homo sapiens; identical to SEQ ID NO: 467721
  chr8:495635-495704
  hypo
  upper_gi vs. liver_bileduct

SEQ ID NO: 481716 - DNA, 111 bp, Homo sapiens; identical to SEQ ID NO: 475162
  chr8:8560686-8560797
  hypo
  upper_gi vs. colorectal

SEQ ID NO: 481717 - DNA, 42 bp, Homo sapiens; identical to SEQ ID NO: 354151
  chr8:8561032-8561074
  hypo
  upper_gi vs. colorectal

SEQ ID NO: 481718 - DNA, 106 bp, Homo sapiens; identical to SEQ ID NO: 350705
  chr8:8639980-8640086
  hypo
  upper_gi vs. head_and_neck,liver_bileduct, lymphoid_neoplasm

SEQ ID NO: 481719 - DNA, 241 bp, Homo sapiens; identical to SEQ ID NO: 481133
  chr8:10873649-10873890
  hypo
  upper_gi vs. multiple_myeloma,pancreas_gallbladder,ovary, bladder_and_urothelial,uterine,renal,lymphoid_neoplasm

SEQ ID NO: 481720 - DNA, 241 bp, Homo sapiens; identical to SEQ ID NO: 481133
  chr8:10873649-10873890
  hypo
  upper_gi vs. bladder_and_urothelial,anorectal,renal, pancreas_gallbladder,prostate,multiple_myeloma, lymphoid_neoplasm,ovary,uterine

SEQ ID NO: 481721 - DNA, 377 bp, Homo sapiens; identical to SEQ ID NO: 481136
  chr8:11058799-11059176
  hypo
  upper_gi vs. pancreas_gallbladder

SEQ ID NO: 481722 - DNA, 227 bp, Homo sapiens; identical to SEQ ID NO: 474394
  chr8:38326050-38326277
  hypo
  upper_gi vs. breast,cervical,melanoma,ovary, head_and_neck,renal,prostate,lung,uterine,sarcoma, bladder_and_urothelial,non_cancer,myeloid_neoplasm,thyroid, pancreas_gallbladder

SEQ ID NO: 481723 - DNA, 128 bp, Homo sapiens; identical to SEQ ID NO: 467756
  chr8:53853387-53853515
  hypo
  upper_gi vs. anorectal

SEQ ID NO: 481724 - DNA, 267 bp, Homo sapiens; identical to SEQ ID NO: 350760
  chr8:65494311-65494578
  hypo
  upper_gi vs. sarcoma,anorectal,lung,head_and_neck, bladder_and_urothelial,myeloid_neoplasm,prostate,melanoma, thyroid,breast

SEQ ID NO: 481725 - DNA, 55 bp, Homo sapiens; identical to SEQ ID NO: 346990
  chr8:72756949-72757004
  hypo
  upper_gi vs. sarcoma,renal,melanoma

SEQ ID NO: 481726 - DNA, 27 bp, Homo sapiens
  chr8:75896528-75896555
  hypo
  upper_gi vs. lung
cgggcttgggtctcgggagcccaaagc

SEQ ID NO: 481727 - DNA, 274 bp, Homo sapiens; identical to SEQ ID NO: 481154
  chr8:81398155-81398429
  hypo
  upper_gi vs. liver_bileduct

SEQ ID NO: 481728 - DNA, 274 bp, Homo sapiens; identical to SEQ ID NO: 481154
  chr8:81398155-81398429
  hypo
  upper_gi vs. liver_bileduct,pancreas_gallbladder

SEQ ID NO: 481729 - DNA, 398 bp, Homo sapiens; identical to SEQ ID NO: 463071
  chr8:104511554-104511952
  hypo
  upper_gi vs. head_and_neck,uterine,breast,ovary

SEQ ID NO: 481730 - DNA, 430 bp, Homo sapiens; identical to SEQ ID NO: 463072
  chr8:104511554-104511984
  hypo
  upper_gi vs. head_and_neck,bladder_and_urothelial,ovary, uterine,thyroid,anorectal

SEQ ID NO: 481731 - DNA, 18 bp, Homo sapiens
  chr8:104511966-104511984
  hypo
  upper_gi vs. head_and_neck,sarcoma,melanoma, bladder_and_urothelial,anorectal,thyroid,cervical
cgctcagtctctcctccc

SEQ ID NO: 481732 - DNA, 226 bp, Homo sapiens; identical to SEQ ID NO: 474420
  chr8:109799189-109799415
  hypo
  upper_gi vs. anorectal,uterine,ovary,lung,head_and_neck

SEQ ID NO: 481733 - DNA, 42 bp, Homo sapiens; identical to SEQ ID NO: 350816
  chr8:109799903-109799945
  hypo
  upper_gi vs. anorectal,uterine,ovary,lung,head_and_neck

SEQ ID NO: 481734 - DNA, 221 bp, Homo sapiens; identical to SEQ ID NO: 340002
  chr8:118531602-118531823
  hypo
  upper_gi vs. liver_bileduct

SEQ ID NO: 481735 - DNA, 541 bp, Homo sapiens; identical to SEQ ID NO: 454513
  chr8:121823361-121823902
  hypo
  upper_gi vs. liver_bileduct

SEQ ID NO: 481736 - DNA, 27 bp, Homo sapiens
  chr8:121823930-121823957
  hypo
  upper_gi vs. liver_bileduct
ctcgctgctcagaaccagggcgtcctc

SEQ ID NO: 481737 - DNA, 106 bp, Homo sapiens; identical to SEQ ID NO: 475895
  chr8:131455079-131455185
  hypo
  upper_gi vs. pancreas_gallbladder,liver_bileduct

SEQ ID NO: 481738 - DNA, 189 bp, Homo sapiens; identical to SEQ ID NO: 481177
  chr8:133491923-133492112
  hypo
  upper_gi vs. melanoma

SEQ ID NO: 481739 - DNA, 65 bp, Homo sapiens; identical to SEQ ID NO: 372006
  chr8:133492127-133492192
  hypo
  upper_gi vs. melanoma

SEQ ID NO: 481740 - DNA, 12 bp, Homo sapiens
  chr8:133492249-133492261
  hypo
  upper_gi vs. renal,uterine,thyroid,lung,ovary,non_cancer, myeloid_neoplasm
cgcgtgctgagg

SEQ ID NO: 481741 - DNA, 311 bp, Homo sapiens; identical to SEQ ID NO: 474427
  chr8:133493185-133493496
  hypo
  upper_gi vs. renal,lung,uterine,melanoma,thyroid, non_cancer,ovary

SEQ ID NO: 481742 - DNA, 311 bp, Homo sapiens; identical to SEQ ID NO: 474427
  chr8:133493185-133493496
  hypo
  upper_gi vs. colorectal

SEQ ID NO: 481743 - DNA, 938 bp, Homo sapiens; identical to SEQ ID NO: 459880
  chr8:134582236-134583174
  hypo
  upper_gi vs. pancreas_gallbladder

SEQ ID NO: 481744 - DNA, 436 bp, Homo sapiens; identical to SEQ ID NO: 459881
  chr8:134582738-134583174
  hypo
  upper_gi vs. pancreas_gallbladder

SEQ ID NO: 481745 - DNA, 438 bp, Homo sapiens; identical to SEQ ID NO: 459882
  chr8:134583293-134583731
  hypo
  upper_gi vs. pancreas_gallbladder

SEQ ID NO: 481746 - DNA, 926 bp, Homo sapiens; identical to SEQ ID NO: 359232
  chr8:134583293-134584219
  hypo
  upper_gi vs. pancreas_gallbladder

SEQ ID NO: 481747 - DNA, 64 bp, Homo sapiens; identical to SEQ ID NO: 359243
  chr8:143531771-143531835
  hypo
  upper_gi vs. melanoma

SEQ ID NO: 481748 - DNA, 93 bp, Homo sapiens; identical to SEQ ID NO: 481188
  chr9:214559-214652
  hypo
  upper_gi vs. pancreas_gallbladder

SEQ ID NO: 481749 - DNA, 3 bp, Homo sapiens
  chr9:66494093-66494096
  hypo
  upper_gi vs. bladder_and_urothelial,lymphoid_neoplasm, breast,multiple_myeloma
cgc

SEQ ID NO: 481750 - DNA, 150 bp, Homo sapiens; identical to SEQ ID NO: 481198
  chr9:74061513-74061663
  hypo
  upper_gi vs. melanoma

SEQ ID NO: 481751 - DNA, 15 bp, Homo sapiens
  chr9:99984044-99984059
  hypo
  upper_gi vs. melanoma,sarcoma,ovary
ctggccgtgactccc

SEQ ID NO: 481752 - DNA, 41 bp, Homo sapiens; identical to SEQ ID NO: 359367
  chr9:99984107-99984148
  hypo
  upper_gi vs. melanoma,sarcoma,ovary

SEQ ID NO: 481753 - DNA, 69 bp, Homo sapiens; identical to SEQ ID NO: 481206
  chr9:108418403-108418472
  hypo
  upper_gi vs. liver_bileduct

SEQ ID NO: 481754 - DNA, 171 bp, Homo sapiens; identical to SEQ ID NO: 372189
  chr9:108418947-108419118
  hypo
  upper_gi vs. liver_bileduct

SEQ ID NO: 481755 - DNA, 113 bp, Homo sapiens; identical to SEQ ID NO: 481212
  chr9:132804293-132804406
  hypo
  upper_gi vs. bladder_and_urothelial,lung, pancreas_gallbladder,breast,ovary,liver_bileduct,renal,melanoma, lymphoid_neoplasm,prostate,anorectal,cervical,colorectal, uterine,head_and_neck,non_cancer,myeloid_neoplasm,thyroid,
  CONT. FROM ABOVE: sarcoma

SEQ ID NO: 481756 - DNA, 208 bp, Homo sapiens; identical to SEQ ID NO: 481213
  chr9:132804455-132804663
  hypo
  upper_gi vs. bladder_and_urothelial,lung, pancreas_gallbladder,breast,ovary,liver_bileduct,renal,melanoma, lymphoid_neoplasm,prostate,anorectal,cervical,colorectal, uterine,head_and_neck,non_cancer,myeloid_neoplasm,thyroid,
  CONT. FROM ABOVE: sarcoma

SEQ ID NO: 481757 - DNA, 172 bp, Homo sapiens; identical to SEQ ID NO: 481221
  chr9:132805445-132805617
  hypo
  upper_gi vs. lung,cervical,liver_bileduct,head_and_neck, pancreas_gallbladder,bladder_and_urothelial,breast,ovary,renal, lymphoid_neoplasm,melanoma,anorectal,prostate,colorectal, uterine,non_cancer,multiple_myeloma

SEQ ID NO: 481758 - DNA, 293 bp, Homo sapiens; identical to SEQ ID NO: 481223
  chr9:132805445-132805738
  hypo
  upper_gi vs. pancreas_gallbladder,liver_bileduct,lung, cervical,breast,bladder_and_urothelial,melanoma,head_and_neck, renal,colorectal,ovary,anorectal,prostate,uterine,sarcoma

SEQ ID NO: 481759 - DNA, 307 bp, Homo sapiens; identical to SEQ ID NO: 481225
  chr9:133814911-133815218
  hypo
  upper_gi vs. pancreas_gallbladder

SEQ ID NO: 481760 - DNA, 292 bp, Homo sapiens; identical to SEQ ID NO: 460563
  chr9:139506149-139506441
  hypo
  upper_gi vs. lymphoid_neoplasm,melanoma,liver_bileduct

SEQ ID NO: 481761 - DNA, 30 bp, Homo sapiens; identical to SEQ ID NO: 460564
  chr9:139506516-139506546
  hypo
  upper_gi vs. lymphoid_neoplasm,melanoma,liver_bileduct

SEQ ID NO: 481762 - DNA, 252 bp, Homo sapiens; identical to SEQ ID NO: 340449
  chr9:139611146-139611398
  hypo
  upper_gi vs. liver_bileduct

SEQ ID NO: 481763 - DNA, 949 bp, Homo sapiens; identical to SEQ ID NO: 454530
  chrY:16636193-16637142
  hypo
  upper_gi vs. liver_bileduct

SEQ ID NO: 481764 - DNA, 3 bp, Homo sapiens
  chr1:4716701-4716704
  hyper
  uterine vs. ovary
agc

SEQ ID NO: 481765 - DNA, 248 bp, Homo sapiens; identical to SEQ ID NO: 330682
  chr1:8014160-8014408
  hyper
  uterine vs. pancreas_gallbladder

SEQ ID NO: 481766 - DNA, 517 bp, Homo sapiens; identical to SEQ ID NO: 455503
  chr1:12226892-12227409
  hyper
  uterine vs. ovary

SEQ ID NO: 481767 - DNA, 207 bp, Homo sapiens; identical to SEQ ID NO: 455504
  chr1:12227438-12227645
  hyper
  uterine vs. ovary

SEQ ID NO: 481768 - DNA, 247 bp, Homo sapiens; identical to SEQ ID NO: 455505
  chr1:12227162-12227409
  hyper
  uterine vs. ovary,colorectal

SEQ ID NO: 481769 - DNA, 207 bp, Homo sapiens; identical to SEQ ID NO: 455504
  chr1:12227438-12227645
  hyper
  uterine vs. ovary,colorectal

SEQ ID NO: 481770 - DNA, 205 bp, Homo sapiens; identical to SEQ ID NO: 457247
  chr1:18434105-18434310
  hyper
  uterine vs. melanoma

SEQ ID NO: 481771 - DNA, 37 bp, Homo sapiens; identical to SEQ ID NO: 349182
  chr1:18434816-18434853
  hyper
  uterine vs. melanoma

SEQ ID NO: 481772 - DNA, 29 bp, Homo sapiens
  chr1:23749161-23749190
  hyper
  uterine vs. colorectal
aaactggctccatgctgcagggaccctgc

SEQ ID NO: 481773 - DNA, 130 bp, Homo sapiens; identical to SEQ ID NO: 454093
  chr1:32410105-32410235
  hyper
  uterine vs. colorectal

SEQ ID NO: 481774 - DNA, 21 bp, Homo sapiens
  chr1:36042458-36042479
  hyper
  uterine vs. non_cancer,myeloid_neoplasm,renal
cgggacgcggccgcgcggact

SEQ ID NO: 481775 - DNA, 1 bp, Homo sapiens
  chr1:41284752-41284753
  hyper
  uterine vs. bladder_and_urothelial,multiple_myeloma, non_cancer
c

SEQ ID NO: 481776 - DNA, 932 bp, Homo sapiens; identical to SEQ ID NO: 472495
  chr1:46767970-46768902
  hyper
  uterine vs. upper_gi,lung,head_and_neck,breast, liver_bileduct,pancreas_gallbladder,lymphoid_neoplasm, colorectal,cervical,melanoma,prostate,sarcoma,multiple_myeloma, anorectal

SEQ ID NO: 481777 - DNA, 982 bp, Homo sapiens; identical to SEQ ID NO: 472496
  chr1:46768416-46769398
  hyper
  uterine vs. upper_gi,head_and_neck,lung,breast, liver_bileduct,pancreas_gallbladder,colorectal, lymphoid_neoplasm,cervical,melanoma,prostate,sarcoma, multiple_myeloma,anorectal

SEQ ID NO: 481778 - DNA, 931 bp, Homo sapiens; identical to SEQ ID NO: 472497
  chr1:46768904-46769835
  hyper
  uterine vs. upper_gi,lung,liver_bileduct, pancreas_gallbladder,colorectal,lymphoid_neoplasm,breast, head_and_neck,cervical,melanoma,prostate,sarcoma, multiple_myeloma,anorectal

SEQ ID NO: 481779 - DNA, 61 bp, Homo sapiens; identical to SEQ ID NO: 455531
  chr1:66999412-66999473
  hyper
  uterine vs. non_cancer,sarcoma

SEQ ID NO: 481780 - DNA, 36 bp, Homo sapiens; identical to SEQ ID NO: 349259
  chr1:66999673-66999709
  hyper
  uterine vs. non_cancer,sarcoma

SEQ ID NO: 481781 - DNA, 438 bp, Homo sapiens; identical to SEQ ID NO: 464043
  chr1:90308855-90309293
  hyper
  uterine vs. cervical,melanoma,anorectal,multiple_myeloma, colorectal,sarcoma,pancreas_gallbladder,lymphoid_neoplasm, head_and_neck,upper_gi,bladder_and_urothelial,myeloid_neoplasm, non_cancer,breast,renal,thyroid,liver_bileduct

SEQ ID NO: 481782 - DNA, 115 bp, Homo sapiens; identical to SEQ ID NO: 344961
  chr1:90309490-90309605
  hyper
  uterine vs. cervical,melanoma,anorectal,multiple_myeloma, colorectal,sarcoma,pancreas_gallbladder,lymphoid_neoplasm, head_and_neck,upper_gi,bladder_and_urothelial,myeloid_neoplasm, non_cancer,breast,renal,thyroid,liver_bileduct

SEQ ID NO: 481783 - DNA, 61 bp, Homo sapiens; identical to SEQ ID NO: 455537
  chr1:91185065-91185126
  hyper
  uterine vs. multiple_myeloma,myeloid_neoplasm

SEQ ID NO: 481784 - DNA, 244 bp, Homo sapiens; identical to SEQ ID NO: 346359
  chr1:103574168-103574412
  hyper
  uterine vs. multiple_myeloma,myeloid_neoplasm

SEQ ID NO: 481785 - DNA, 113 bp, Homo sapiens; identical to SEQ ID NO: 349296
  chr1:109204221-109204334
  hyper
  uterine vs. cervical,multiple_myeloma,upper_gi, bladder_and_urothelial,non_cancer,breast,colorectal,prostate

SEQ ID NO: 481786 - DNA, 365 bp, Homo sapiens; identical to SEQ ID NO: 459281
  chr1:110753530-110753895
  hyper
  uterine vs. ovary

SEQ ID NO: 481787 - DNA, 47 bp, Homo sapiens; identical to SEQ ID NO: 459282
  chr1:110753957-110754004
  hyper
  uterine vs. ovary

SEQ ID NO: 481788 - DNA, 16 bp, Homo sapiens
  chr1:110754101-110754117
  hyper
  uterine vs. ovary
ggagccccgcagcgct

SEQ ID NO: 481789 - DNA, 69 bp, Homo sapiens; identical to SEQ ID NO: 452736
  chr1:111506646-111506715
  hyper
  uterine vs. ovary,melanoma

SEQ ID NO: 481790 - DNA, 360 bp, Homo sapiens; identical to SEQ ID NO: 344970
  chr1:111506646-111507006
  hyper
  uterine vs. ovary

SEQ ID NO: 481791 - DNA, 142 bp, Homo sapiens; identical to SEQ ID NO: 464058
  chr1:119548917-119549059
  hyper
  uterine vs. myeloid_neoplasm

SEQ ID NO: 481792 - DNA, 84 bp, Homo sapiens; identical to SEQ ID NO: 454098
  chr1:119548975-119549059
  hyper
  uterine vs. myeloid_neoplasm,non_cancer,thyroid

SEQ ID NO: 481793 - DNA, 84 bp, Homo sapiens; identical to SEQ ID NO: 330956
  chr1:150586185-150586269
  hyper
  uterine vs. liver_bileduct

SEQ ID NO: 481794 - DNA, 43 bp, Homo sapiens; identical to SEQ ID NO: 455561
  chr1:156390054-156390097
  hyper
  uterine vs. non_cancer,multiple_myeloma

SEQ ID NO: 481795 - DNA, 367 bp, Homo sapiens; identical to SEQ ID NO: 330998
  chr1:161195526-161195893
  hyper
  uterine vs. liver_bileduct,lymphoid_neoplasm, bladder_and_urothelial,lung,renal,melanoma,colorectal,upper_gi, multiple_myeloma

SEQ ID NO: 481796 - DNA, 187 bp, Homo sapiens; identical to SEQ ID NO: 330999
  chr1:161196150-161196337
  hyper
  uterine vs. liver_bileduct,bladder_and_urothelial

SEQ ID NO: 481797 - DNA, 93 bp, Homo sapiens; identical to SEQ ID NO: 346376
  chr1:161276123-161276216
  hyper
  uterine vs. anorectal,multiple_myeloma,thyroid

SEQ ID NO: 481798 - DNA, 805 bp, Homo sapiens; identical to SEQ ID NO: 331017
  chr1:165737832-165738637
  hyper
  uterine vs. lung,pancreas_gallbladder,melanoma, head_and_neck,colorectal,cervical,breast,renal,sarcoma, multiple_myeloma,prostate,liver_bileduct,lymphoid_neoplasm, ovary,non_cancer,bladder_and_urothelial,myeloid_neoplasm,
  CONT. FROM ABOVE: upper_gi,thyroid

SEQ ID NO: 481799 - DNA, 119 bp, Homo sapiens; identical to SEQ ID NO: 472501
  chr1:184633170-184633289
  hyper
  uterine vs. colorectal

SEQ ID NO: 481800 - DNA, 81 bp, Homo sapiens; identical to SEQ ID NO: 356953
  chr1:184633350-184633431
  hyper
  uterine vs. colorectal

SEQ ID NO: 481801 - DNA, 94 bp, Homo sapiens; identical to SEQ ID NO: 457295
  chr1:196577278-196577372
  hyper
  uterine vs. ovary

SEQ ID NO: 481802 - DNA, 194 bp, Homo sapiens; identical to SEQ ID NO: 457296
  chr1:196577435-196577629
  hyper
  uterine vs. ovary

SEQ ID NO: 481803 - DNA, 152 bp, Homo sapiens; identical to SEQ ID NO: 472504
  chr1:219347035-219347187
  hyper
  uterine vs. breast,upper_gi,renal,lymphoid_neoplasm, multiple_myeloma,melanoma,pancreas_gallbladder, bladder_and_urothelial,liver_bileduct,myeloid_neoplasm,prostate, thyroid,colorectal,lung,head_and_neck,sarcoma,cervical,
  CONT. FROM ABOVE: non_cancer

SEQ ID NO: 481804 - DNA, 55 bp, Homo sapiens; identical to SEQ ID NO: 344990
  chr1:219347516-219347571
  hyper
  uterine vs. breast,upper_gi,renal,lymphoid_neoplasm, multiple_myeloma,melanoma,pancreas_gallbladder, bladder_and_urothelial,liver_bileduct,myeloid_neoplasm,prostate, thyroid,colorectal,lung,head_and_neck,sarcoma,cervical,
  CONT. FROM ABOVE: non_cancer

SEQ ID NO: 481805 - DNA, 694 bp, Homo sapiens; identical to SEQ ID NO: 331162
  chr1:236444211-236444905
  hyper
  uterine vs. head_and_neck

SEQ ID NO: 481806 - DNA, 4 bp, Homo sapiens
  chr1:237205156-237205160
  hyper
  uterine vs. sarcoma
cgtg

SEQ ID NO: 481807 - DNA, 37 bp, Homo sapiens; identical to SEQ ID NO: 466027
  chr1:237205188-237205225
  hyper
  uterine vs. sarcoma

SEQ ID NO: 481808 - DNA, 169 bp, Homo sapiens
  chr1:244080795-244080964
  hyper
  uterine vs. ovary
tgtcatcaaggggcaggctgctcaggatgcaaggtaaccagagctttcctcggactgcttcagtctttggggacgtggggtcaccctaatccttcctgtttatattgtgaacgcgtaggcagcgagacttaagctctgcgtcggtcaataagcatcacgacgcaggcat

SEQ ID NO: 481809 - DNA, 96 bp, Homo sapiens; identical to SEQ ID NO: 345341
  chr10:1780056-1780152
  hyper
  uterine vs. melanoma,prostate,anorectal,head_and_neck, breast,ovary,non_cancer,myeloid_neoplasm,multiple_myeloma

SEQ ID NO: 481810 - DNA, 57 bp, Homo sapiens; identical to SEQ ID NO: 459299
  chr10:7449898-7449955
  hyper
  uterine vs. ovary,renal,myeloid_neoplasm,thyroid,breast

SEQ ID NO: 481811 - DNA, 61 bp, Homo sapiens; identical to SEQ ID NO: 459300
  chr10:7453036-7453097
  hyper
  uterine vs. ovary,melanoma,prostate,renal,breast, multiple_myeloma

SEQ ID NO: 481812 - DNA, 61 bp, Homo sapiens; identical to SEQ ID NO: 459300
  chr10:7453036-7453097
  hyper
  uterine vs. melanoma,ovary,breast,prostate,renal

SEQ ID NO: 481813 - DNA, 229 bp, Homo sapiens; identical to SEQ ID NO: 459302
  chr10:7454077-7454306
  hyper
  uterine vs. breast

SEQ ID NO: 481814 - DNA, 52 bp, Homo sapiens; identical to SEQ ID NO: 462290
  chr10:8097537-8097589
  hyper
  uterine vs. breast,myeloid_neoplasm

SEQ ID NO: 481815 - DNA, 47 bp, Homo sapiens
  chr10:26222946-26222993
  hyper
  uterine vs. cervical
cggccggagtcccgggaagcccctcggcagccagccaagggccctgc

SEQ ID NO: 481816 - DNA, 64 bp, Homo sapiens
  chr10:26503630-26503694
  hyper
  uterine vs. thyroid
cggagttgttattgtggtgacctagagtgtcagagccaggagagcaagaaagaggagccaaact

SEQ ID NO: 481817 - DNA, 91 bp, Homo sapiens; identical to SEQ ID NO: 459311
  chr10:26726986-26727077
  hyper
  uterine vs. myeloid_neoplasm

SEQ ID NO: 481818 - DNA, 136 bp, Homo sapiens; identical to SEQ ID NO: 455587
  chr10:43697752-43697888
  hyper
  uterine vs. sarcoma

SEQ ID NO: 481819 - DNA, 125 bp, Homo sapiens; identical to SEQ ID NO: 455588
  chr10:43698155-43698280
  hyper
  uterine vs. sarcoma

SEQ ID NO: 481820 - DNA, 398 bp, Homo sapiens; identical to SEQ ID NO: 454118
  chr10:43892377-43892775
  hyper
  uterine vs. pancreas_gallbladder

SEQ ID NO: 481821 - DNA, 171 bp, Homo sapiens; identical to SEQ ID NO: 347088
  chr10:43892970-43893141
  hyper
  uterine vs. pancreas_gallbladder

SEQ ID NO: 481822 - DNA, 4 bp, Homo sapiens
  chr10:44806356-44806360
  hyper
  uterine vs. pancreas_gallbladder
cggg

SEQ ID NO: 481823 - DNA, 107 bp, Homo sapiens; identical to SEQ ID NO: 345354
  chr10:44806674-44806781
  hyper
  uterine vs. pancreas_gallbladder

SEQ ID NO: 481824 - DNA, 174 bp, Homo sapiens; identical to SEQ ID NO: 466083
  chr10:44879650-44879824
  hyper
  uterine vs. ovary,breast,myeloid_neoplasm,renal,lung

SEQ ID NO: 481825 - DNA, 198 bp, Homo sapiens; identical to SEQ ID NO: 452766
  chr10:44882100-44882298
  hyper
  uterine vs. upper_gi,pancreas_gallbladder, bladder_and_urothelial,colorectal,breast

SEQ ID NO: 481826 - DNA, 28 bp, Homo sapiens
  chr10:44882362-44882390
  hyper
  uterine vs. upper_gi,pancreas_gallbladder, bladder_and_urothelial,colorectal,breast
ctggccaaagcaaacgccatcgcctctc

SEQ ID NO: 481827 - DNA, 99 bp, Homo sapiens; identical to SEQ ID NO: 287184
  chr10:71333132-71333231
  hyper
  uterine vs. melanoma

SEQ ID NO: 481828 - DNA, 147 bp, Homo sapiens; identical to SEQ ID NO: 455589
  chr10:73846836-73846983
  hyper
  uterine vs. non_cancer,myeloid_neoplasm, pancreas_gallbladder,thyroid

SEQ ID NO: 481829 - DNA, 164 bp, Homo sapiens; identical to SEQ ID NO: 351056
  chr10:73847427-73847591
  hyper
  uterine vs. non_cancer,myeloid_neoplasm, pancreas_gallbladder,thyroid

SEQ ID NO: 481830 - DNA, 262 bp, Homo sapiens; identical to SEQ ID NO: 468641
  chr10:73847427-73847689
  hyper

SEQ ID NO: 481831 - DNA, 28 bp, Homo sapiens
  chr10:75407371-75407399
  hyper
  uterine vs. pancreas_gallbladder
cgaggctcagagcatcttcttcaggacc

SEQ ID NO: 481832 - DNA, 178 bp, Homo sapiens
  chr10:83635818-83635996
  hyper
  uterine vs. ovary
ctggaccctgtctccctttcaggatgctgcctcctcttcttcctcttcttcctcctccgctaccaccaccacaccagaaactagcaccagccccaaatttcgtaagtaaacactgtgtctcaactatgatttactactgagtttcccttctgccctcctgctgtctttttccctcgcc

SEQ ID NO: 481833 - DNA, 416 bp, Homo sapiens
  chr10:83635818-83636234
  hyper
  uterine vs. ovary
ctggaccctgtctccctttcaggatgctgcctcctcttcttcctcttcttcctcctccgctaccaccaccacaccagaaactagcaccagccccaaatttcgtaagtaaacactgtgtctcaactatgatttactactgagtttcccttctgccctcctgctgtctttttccctcgccgcctgttttctagcaagccccctcccccatcccaggtttggggcagagtgagagctgattaaaactggccaccagcggggaagaaggtgccagcctgctctggttctgggggggtgggggcgtgtaggaacgggagggagattgtcaggctccactggccccactttagcgggtcccaagtgagaacagatctcccaactcccttcaaagggttaacgcgagtgcgatccctcctcac

SEQ ID NO: 481834 - DNA, 64 bp, Homo sapiens; identical to SEQ ID NO: 359616
  chr10:83636388-83636452
  hyper
  uterine vs. ovary

SEQ ID NO: 481835 - DNA, 54 bp, Homo sapiens; identical to SEQ ID NO: 480266
  chr10:90342577-90342631
  hyper
  uterine vs. ovary,cervical,multiple_myeloma,anorectal, breast,prostate,sarcoma,renal,non_cancer

SEQ ID NO: 481836 - DNA, 20 bp, Homo sapiens
  chr10:100993468-100993488
  hyper
  uterine vs. thyroid,myeloid_neoplasm,non_cancer,breast, multiple_myeloma,ovary,prostate
cgtggctaccccagggtctt

SEQ ID NO: 481837 - DNA, 124 bp, Homo sapiens; identical to SEQ ID NO: 345364
  chr10:100994695-100994819
  hyper
  uterine vs. myeloid_neoplasm,non_cancer,thyroid,breast, multiple_myeloma

SEQ ID NO: 481838 - DNA, 57 bp, Homo sapiens; identical to SEQ ID NO: 459329
  chr10:101089476-101089533
  hyper
  uterine vs. ovary

SEQ ID NO: 481839 - DNA, 237 bp, Homo sapiens; identical to SEQ ID NO: 459330
  chr10:101089565-101089802
  hyper
  uterine vs. ovary

SEQ ID NO: 481840 - DNA, 109 bp, Homo sapiens; identical to SEQ ID NO: 202224
  chr10:102587493-102587602
  hyper
  uterine vs. melanoma,breast,anorectal,myeloid_neoplasm

SEQ ID NO: 481841 - DNA, 110 bp, Homo sapiens; identical to SEQ ID NO: 472512
  chr10:102587493-102587603
  hyper
  uterine vs. breast

SEQ ID NO: 481842 - DNA, 164 bp, Homo sapiens; identical to SEQ ID NO: 457345
  chr10:102587906-102588070
  hyper
  uterine vs. breast

SEQ ID NO: 481843 - DNA, 164 bp, Homo sapiens; identical to SEQ ID NO: 457345
  chr10:102587906-102588070
  hyper
  uterine vs. sarcoma,breast,colorectal

SEQ ID NO: 481844 - DNA, 78 bp, Homo sapiens; identical to SEQ ID NO: 457346
  chr10:102588175-102588253
  hyper
  uterine vs. sarcoma,breast,colorectal

SEQ ID NO: 481845 - DNA, 15 bp, Homo sapiens
  chr10:102588427-102588442
  hyper
  uterine vs. sarcoma,breast,colorectal
gttctgagctggcgt

SEQ ID NO: 481846 - DNA, 293 bp, Homo sapiens; identical to SEQ ID NO: 359672
  chr10:106398982-106399275
  hyper
  uterine vs. multiple_myeloma,myeloid_neoplasm

SEQ ID NO: 481847 - DNA, 82 bp, Homo sapiens; identical to SEQ ID NO: 359673
  chr10:108924881-108924963
  hyper
  uterine vs. melanoma

SEQ ID NO: 481848 - DNA, 40 bp, Homo sapiens; identical to SEQ ID NO: 473623
  chr10:110671608-110671648
  hyper
  uterine vs. ovary

SEQ ID NO: 481849 - DNA, 185 bp, Homo sapiens
  chr10:118031118-118031303
  hyper
  uterine vs. breast
cgggaaaaacttttctcttccaagtttgctctcccggccccaatgctccccaactccacctgcccgccgcggctccgcgagctcccagagactctctgggggtgcagggccctgggctggagggcttcttagtcccccgccaagttgggtcattaaaaaccacaggaaatcaaaaccaagcccga

SEQ ID NO: 481850 - DNA, 240 bp, Homo sapiens; identical to SEQ ID NO: 454122
  chr10:118891774-118892014
  hyper
  uterine vs. multiple_myeloma,thyroid

SEQ ID NO: 481851 - DNA, 112 bp, Homo sapiens; identical to SEQ ID NO: 472518
  chr10:119294170-119294282
  hyper
  uterine vs. breast,prostate,lung,multiple_myeloma, myeloid_neoplasm,thyroid,non_cancer,bladder_and_urothelial

SEQ ID NO: 481852 - DNA, 117 bp, Homo sapiens
  chr10:119296211-119296328
  hyper
  uterine vs. breast,bladder_and_urothelial, multiple_myeloma,cervical,thyroid,colorectal,prostate
gtcctaggctttcatttgaaggcagctgagggagaaagaaactgcaaacccctttggttctgtttccttgctttcaataatgaatcgagacagcgtgtgtgtggtgagggagtgacg

SEQ ID NO: 481853 - DNA, 53 bp, Homo sapiens
  chr10:119296362-119296415
  hyper
  uterine vs. breast,bladder_and_urothelial, multiple_myeloma,cervical,thyroid,colorectal,prostate
gtggggtcctgccagtggctccatgcgtcactgaaacattgggtctcaaaacg

SEQ ID NO: 481854 - DNA, 29 bp, Homo sapiens
  chr10:119296524-119296553
  hyper
  uterine vs. breast,bladder_and_urothelial, multiple_myeloma,cervical,thyroid,colorectal,prostate
cggagctccaagcagttatgctgagggcg

SEQ ID NO: 481855 - DNA, 63 bp, Homo sapiens
  chr10:119296567-119296630
  hyper
  uterine vs. breast,bladder_and_urothelial, multiple_myeloma,cervical,thyroid,colorectal,prostate
ccttgctatgacacgggtttccagtgaagcccaagcggattccacggccccacatcaccggag

SEQ ID NO: 481856 - DNA, 69 bp, Homo sapiens; identical to SEQ ID NO: 470975
  chr10:119494306-119494375
  hyper
  uterine vs. myeloid_neoplasm,multiple_myeloma

SEQ ID NO: 481857 - DNA, 138 bp, Homo sapiens; identical to SEQ ID NO: 345371
  chr10:122708760-122708898
  hyper
  uterine vs. multiple_myeloma,myeloid_neoplasm,thyroid, renal,non_cancer,pancreas_gallbladder,melanoma,sarcoma, colorectal,prostate

SEQ ID NO: 481858 - DNA, 69 bp, Homo sapiens
  chr10:124639064-124639133
  hyper
  uterine vs. anorectal
cgtcgaaaaaccgccgtggtgcccgcgcacagtgcaccgcgcctgcgcatggtctccaaaggctgagcg

SEQ ID NO: 481859 - DNA, 163 bp, Homo sapiens; identical to SEQ ID NO: 359711
  chr10:124639526-124639689
  hyper
  uterine vs. anorectal

SEQ ID NO: 481860 - DNA, 154 bp, Homo sapiens; identical to SEQ ID NO: 372600
  chr10:135192037-135192191
  hyper
  uterine vs. lung

SEQ ID NO: 481861 - DNA, 345 bp, Homo sapiens; identical to SEQ ID NO: 480287
  chr11:8041149-8041494
  hyper
  uterine vs. ovary

SEQ ID NO: 481862 - DNA, 108 bp, Homo sapiens; identical to SEQ ID NO: 468669
  chr11:17373019-17373127
  hyper
  uterine vs. ovary

SEQ ID NO: 481863 - DNA, 167 bp, Homo sapiens; identical to SEQ ID NO: 468670
  chr11:17373405-17373572
  hyper
  uterine vs. ovary

SEQ ID NO: 481864 - DNA, 116 bp, Homo sapiens; identical to SEQ ID NO: 7948
  chr11:17373642-17373758
  hyper
  uterine vs. ovary

SEQ ID NO: 481865 - DNA, 203 bp, Homo sapiens; identical to SEQ ID NO: 334184
  chr11:17374000-17374203
  hyper
  uterine vs. ovary

SEQ ID NO: 481866 - DNA, 917 bp, Homo sapiens; identical to SEQ ID NO: 345381
  chr11:19798519-19799436
  hyper
  uterine vs. ovary

SEQ ID NO: 481867 - DNA, 5 bp, Homo sapiens
  chr11:32354840-32354845
  hyper
  uterine vs. myeloid_neoplasm,multiple_myeloma
cgccc

SEQ ID NO: 481868 - DNA, 27 bp, Homo sapiens
  chr11:32355338-32355365
  hyper
  uterine vs. myeloid_neoplasm,multiple_myeloma
gctcggttcaggacgtccgggaacccc

SEQ ID NO: 481869 - DNA, 171 bp, Homo sapiens
  chr11:40314522-40314693
  hyper
  uterine vs. ovary
cgaagaatttggggagcaacttcccccccactctccatccttccggccggccccttcgccaaagatctgattagatttctcatcacaacccagtgcgcaattgaatttttgatttcagccacccggccagccaccttcccctctcccctccaaactccggttatatcctgt

SEQ ID NO: 481870 - DNA, 362 bp, Homo sapiens; identical to SEQ ID NO: 372705
  chr11:40314923-40315285
  hyper
  uterine vs. ovary

SEQ ID NO: 481871 - DNA, 28 bp, Homo sapiens
  chr11:45377196-45377224
  hyper
  uterine vs. ovary
ctgaaggcgaccaacgagagggagggcc

SEQ ID NO: 481872 - DNA, 78 bp, Homo sapiens; identical to SEQ ID NO: 459354
  chr11:57194101-57194179
  hyper
  uterine vs. ovary,anorectal,cervical,melanoma,breast

SEQ ID NO: 481873 - DNA, 50 bp, Homo sapiens; identical to SEQ ID NO: 334262
  chr11:57334786-57334836
  hyper
  uterine vs. bladder_and_urothelial,cervical, liver_bileduct,lymphoid_neoplasm,head_and_neck

SEQ ID NO: 481874 - DNA, 20 bp, Homo sapiens
  chr11:60718609-60718629
  hyper
  uterine vs. thyroid,cervical,multiple_myeloma,non_cancer
cggcgacgcgggcatctctc

SEQ ID NO: 481875 - DNA, 550 bp, Homo sapiens; identical to SEQ ID NO: 455613
  chr11:64512349-64512899
  hyper
  uterine vs. ovary

SEQ ID NO: 481876 - DNA, 21 bp, Homo sapiens
  chr11:65192923-65192944
  hyper
  uterine vs. pancreas_gallbladder,upper_gi
cgtcagacttgcatacgcagc

SEQ ID NO: 481877 - DNA, 190 bp, Homo sapiens; identical to SEQ ID NO: 359869
  chr11:65192973-65193163
  hyper
  uterine vs. pancreas_gallbladder,upper_gi

SEQ ID NO: 481878 - DNA, 2 bp, Homo sapiens
  chr11:66885239-66885241
  hyper
  uterine vs. head_and_neck,cervical,lymphoid_neoplasm, pancreas_gallbladder,multiple_myeloma,bladder_and_urothelial
cg

SEQ ID NO: 481879 - DNA, 112 bp, Homo sapiens; identical to SEQ ID NO: 351230
  chr11:66886029-66886141
  hyper
  uterine vs. head_and_neck,cervical,lymphoid_neoplasm, pancreas_gallbladder,multiple_myeloma,bladder_and_urothelial

SEQ ID NO: 481880 - DNA, 76 bp, Homo sapiens; identical to SEQ ID NO: 455625
  chr11:76033216-76033292
  hyper
  uterine vs. bladder_and_urothelial,anorectal, multiple_myeloma,pancreas_gallbladder,cervical,thyroid

SEQ ID NO: 481881 - DNA, 14 bp, Homo sapiens
  chr11:76033342-76033356
  hyper
  uterine vs. bladder_and_urothelial,anorectal, multiple_myeloma,pancreas_gallbladder,cervical,thyroid
cgcctgtgctggcg

SEQ ID NO: 481882 - DNA, 290 bp, Homo sapiens; identical to SEQ ID NO: 359907
  chr11:79150336-79150626
  hyper
  uterine vs. ovary

SEQ ID NO: 481883 - DNA, 13 bp, Homo sapiens
  chr11:91959629-91959642
  hyper
  uterine vs. ovary
agctaagagagcc

SEQ ID NO: 481884 - DNA, 246 bp, Homo sapiens
  chr11:91959654-91959900
  hyper
  uterine vs. ovary
cgggatgagaggaacaggggtgctcccggggtgtgggtgtgctggcggtgacatcctgaggctgcagctcgctggaataatgggctcaaaccaggcggtggagaggggtccccggaatggacgtcgggggcggggaggctgcggagaccctgcgaggtctccgtgaaggactaggaggggctcccgggagggagtggcgcctgcggcccggagcgtgggcggccggtggctctggcacgcggaatc

SEQ ID NO: 481885 - DNA, 256 bp, Homo sapiens
  chr11:91960114-91960370
  hyper
  uterine vs. ovary
ttggatcccacttccatttacaagtgtcagacaaacccgcgagaacctcccccaacccgccccggccccagccagactagggagggcgcccagggggagggggcgagctgtctgggcagtgcctggggaggtgcgacgcgcccacccggggcttgagcggctggggttcctgtgcgtgggtccttaatgtttaaaagatacacatgaacagcaacaaaacccaaaccactcgtggccacttgttttctgccgcttt

SEQ ID NO: 481886 - DNA, 13 bp, Homo sapiens
  chr11:92930623-92930636
  hyper
  uterine vs. lung,cervical,head_and_neck,sarcoma,breast, renal,ovary,multiple_myeloma,melanoma,pancreas_gallbladder, non_cancer,anorectal,prostate,bladder_and_urothelial
cgtgagtcacggc

SEQ ID NO: 481887 - DNA, 676 bp, Homo sapiens
  chr11:92930674-92931350
  hyper
  uterine vs. lung,cervical,head_and_neck,sarcoma,breast, renal,ovary,multiple_myeloma,melanoma,pancreas_gallbladder, non_cancer,anorectal,prostate,bladder_and_urothelial
cgccccactcaacacacacactcacccacacgcgcgcgcgcaaacacacacacacatattttaacgccctattcaggcctgggcttcgtctgaccaagttctcggggtcagataaccggttcctttgcggatgctgaccacggggtcagttagcaatcgggcctcaactcaggccaagcgcggggcccctggaggtgtgggcgcacccgactcccgcacagacccccgcccacgtcagccccggctccctgcccacgcacaacaccgacctagctcctcgcgcctcgccgccccggcagccgccggcgtcgccgccgcttccatctctcgcgggtctccaggacgccgccgcccgagtgctcactctcccgccgctgcgtggccggcgtcaggcccaggcctacctcccctgcccggagggacccgcgcctggtgcccgcctccctgccccggcgctccccaaccgcgcggcgaggagcatgcgcagtgggacagcccggctcggcgggcaccgccggcgaggggcgggaggggccgaagacccgaggactgctgcgaggccgggttgggtaacccgagaggagggttgggtaacctgagatcagcgagggtgggaccttagagctagccgagacccgggcccatagctccctgggggttttaaagatgacggcga

SEQ ID NO: 481888 - DNA, 47 bp, Homo sapiens; identical to SEQ ID NO: 347178
  chr11:92931379-92931426
  hyper
  uterine vs. lung,cervical,head_and_neck,sarcoma,breast, renal,ovary,multiple_myeloma,melanoma,pancreas_gallbladder, non_cancer,anorectal,prostate,bladder_and_urothelial

SEQ ID NO: 481889 - DNA, 54 bp, Homo sapiens
  chr11:121593326-121593380
  hyper
  uterine vs. liver_bileduct
cgtggtcccgccaaacaaaggaacatgtgtgctgcaaaccatccccctatcacg

SEQ ID NO: 481890 - DNA, 223 bp, Homo sapiens; identical to SEQ ID NO: 359955
  chr11:121593636-121593859
  hyper
  uterine vs. liver_bileduct

SEQ ID NO: 481891 - DNA, 10 bp, Homo sapiens
  chr11:125757409-125757419
  hyper
  uterine vs. head_and_neck,cervical
caaaatgtgc

SEQ ID NO: 481892 - DNA, 129 bp, Homo sapiens; identical to SEQ ID NO: 459366
  chr11:128562635-128562764
  hyper
  uterine vs. ovary

SEQ ID NO: 481893 - DNA, 18 bp, Homo sapiens
  chr11:128563818-128563836
  hyper
  uterine vs. multiple_myeloma,ovary,sarcoma
gagaggagagctcgaggc

SEQ ID NO: 481894 - DNA, 16 bp, Homo sapiens
  chr11:133827440-133827456
  hyper
  uterine vs. ovary,prostate,thyroid,renal,lung,non_cancer, breast,pancreas_gallbladder,melanoma,multiple_myeloma,sarcoma
aaacgtgatgcagacc

SEQ ID NO: 481895 - DNA, 17 bp, Homo sapiens
  chr11:133938756-133938773
  hyper
  uterine vs. melanoma,sarcoma,ovary,thyroid, myeloid_neoplasm,prostate,non_cancer
cgccaagttcattgaaa

SEQ ID NO: 481896 - DNA, 161 bp, Homo sapiens; identical to SEQ ID NO: 345407
  chr11:133939437-133939598
  hyper
  uterine vs. melanoma,sarcoma,ovary,thyroid, myeloid_neoplasm,prostate,non_cancer

SEQ ID NO: 481897 - DNA, 146 bp, Homo sapiens
  chr12:1905625-1905771
  hyper
  uterine vs. head_and_neck,cervical,upper_gi, bladder_and_urothelial,pancreas_gallbladder,colorectal, multiple_myeloma,lung
cggtcataagcgggggagcgcagagccagttttcaattcaggagtgtctactctgaagccctcgcttcactccggagcccgctggctctatcctcgcaccgagcctttgcgacaagtgcacagggaacgctaaccccagccctcaa

SEQ ID NO: 481898 - DNA, 205 bp, Homo sapiens
  chr12:1905826-1906031
  hyper
  uterine vs. head_and_neck,cervical,upper_gi, bladder_and_urothelial,pancreas_gallbladder,colorectal, multiple_myeloma,lung
agaagggagccccgatgccagcgccgcaggtgccgcactgttaaatggtgtgccacgggcccgggggtctagggaccgcctggcgagcggcacgtctggctgaggcgaccctcgaggaggccgccgcattcccagcgtgggggtcctcccgggcttgggtgcggggggtcagcaggagagacccttccgcgcggcctccctgcct

SEQ ID NO: 481899 - DNA, 115 bp, Homo sapiens
  chr12:1906322-1906437
  hyper
  uterine vs. head_and_neck,cervical,upper_gi, bladder_and_urothelial,pancreas_gallbladder,colorectal, multiple_myeloma,lung
ggcctcgggaccacctctccccatcccggctgtcccggtccccagccgtcctgcccgcctcagaccgtccgcctcctgcgtgtctcctccactgaggacggcgggggaagacccc

SEQ ID NO: 481900 - DNA, 99 bp, Homo sapiens; identical to SEQ ID NO: 347195
  chr12:1906476-1906575
  hyper
  uterine vs. head_and_neck,cervical,upper_gi, bladder_and_urothelial,pancreas_gallbladder,colorectal, multiple_myeloma,lung

SEQ ID NO: 481901 - DNA, 126 bp, Homo sapiens; identical to SEQ ID NO: 473658
  chr12:4273746-4273872
  hyper
  uterine vs. non_cancer,multiple_myeloma

SEQ ID NO: 481902 - DNA, 245 bp, Homo sapiens; identical to SEQ ID NO: 452815
  chr12:4378558-4378803
  hyper
  uterine vs. colorectal,lymphoid_neoplasm,melanoma,ovary, non_cancer,myeloid_neoplasm

SEQ ID NO: 481903 - DNA, 88 bp, Homo sapiens; identical to SEQ ID NO: 454142
  chr12:4378715-4378803
  hyper
  uterine vs. colorectal,melanoma

SEQ ID NO: 481904 - DNA, 51 bp, Homo sapiens; identical to SEQ ID NO: 454144
  chr12:4382915-4382966
  hyper
  uterine vs. colorectal

SEQ ID NO: 481905 - DNA, 210 bp, Homo sapiens; identical to SEQ ID NO: 454145
  chr12:4382999-4383209
  hyper
  uterine vs. colorectal

SEQ ID NO: 481906 - DNA, 155 bp, Homo sapiens; identical to SEQ ID NO: 345415
  chr12:4384059-4384214
  hyper
  uterine vs. colorectal

SEQ ID NO: 481907 - DNA, 255 bp, Homo sapiens; identical to SEQ ID NO: 455647
  chr12:4384059-4384314
  hyper
  uterine vs. colorectal

SEQ ID NO: 481908 - DNA, 79 bp, Homo sapiens; identical to SEQ ID NO: 351309
  chr12:4384533-4384612
  hyper
  uterine vs. colorectal

SEQ ID NO: 481909 - DNA, 180 bp, Homo sapiens; identical to SEQ ID NO: 360011
  chr12:5020472-5020652
  hyper
  uterine vs. multiple_myeloma,prostate,myeloid_neoplasm

SEQ ID NO: 481910 - DNA, 107 bp, Homo sapiens; identical to SEQ ID NO: 345417
  chr12:14928211-14928318
  hyper
  uterine vs. liver_bileduct,breast,cervical,prostate, renal,upper_gi,pancreas_gallbladder,sarcoma,non_cancer, colorectal,bladder_and_urothelial,multiple_myeloma, myeloid_neoplasm

SEQ ID NO: 481911 - DNA, 72 bp, Homo sapiens
  chr12:34260770-34260842
  hyper
  uterine vs. sarcoma
cgcctggctaggggcaggggcgccgccctcccgcggctccggagctggccaggggaagcgcccgcggggtcc

SEQ ID NO: 481912 - DNA, 136 bp, Homo sapiens; identical to SEQ ID NO: 372976
  chr12:34260905-34261041
  hyper
  uterine vs. sarcoma

SEQ ID NO: 481913 - DNA, 16 bp, Homo sapiens
  chr12:39299102-39299118
  hyper
  uterine vs. liver_bileduct
cccactactgagatat

SEQ ID NO: 481914 - DNA, 70 bp, Homo sapiens; identical to SEQ ID NO: 460673
  chr12:43944719-43944789
  hyper
  uterine vs. thyroid

SEQ ID NO: 481915 - DNA, 194 bp, Homo sapiens; identical to SEQ ID NO: 345427
  chr12:54150983-54151177
  hyper
  uterine vs. liver_bileduct,pancreas_gallbladder

SEQ ID NO: 481916 - DNA, 46 bp, Homo sapiens
  chr12:85430024-85430070
  hyper
  uterine vs. ovary
cgttcgtttcaatttagaatcgagattgtttgtccttctagagcac

SEQ ID NO: 481917 - DNA, 237 bp, Homo sapiens; identical to SEQ ID NO: 360167
  chr12:85430099-85430336
  hyper
  uterine vs. ovary

SEQ ID NO: 481918 - DNA, 265 bp, Homo sapiens; identical to SEQ ID NO: 468722
  chr12:93966037-93966302
  hyper
  uterine vs. anorectal,sarcoma,bladder_and_urothelial, prostate

SEQ ID NO: 481919 - DNA, 66 bp, Homo sapiens; identical to SEQ ID NO: 351396
  chr12:93967274-93967340
  hyper
  uterine vs. anorectal

SEQ ID NO: 481920 - DNA, 229 bp, Homo sapiens; identical to SEQ ID NO: 334625
  chr12:101674003-101674232
  hyper
  uterine vs. lung

SEQ ID NO: 481921 - DNA, 349 bp, Homo sapiens; identical to SEQ ID NO: 459395
  chr12:104851545-104851894
  hyper
  uterine vs. ovary

SEQ ID NO: 481922 - DNA, 321 bp, Homo sapiens; identical to SEQ ID NO: 455674
  chr12:111844290-111844611
  hyper
  uterine vs. lymphoid_neoplasm,anorectal,liver_bileduct, cervical,multiple_myeloma,upper_gi

SEQ ID NO: 481923 - DNA, 99 bp, Homo sapiens; identical to SEQ ID NO: 351412
  chr12:111844690-111844789
  hyper
  uterine vs. lymphoid_neoplasm,anorectal,liver_bileduct, cervical,multiple_myeloma,upper_gi

SEQ ID NO: 481924 - DNA, 178 bp, Homo sapiens; identical to SEQ ID NO: 468743
  chr13:33000891-33001069
  hyper
  uterine vs. anorectal

SEQ ID NO: 481925 - DNA, 204 bp, Homo sapiens; identical to SEQ ID NO: 351462
  chr13:33001228-33001432
  hyper
  uterine vs. anorectal

SEQ ID NO: 481926 - DNA, 37 bp, Homo sapiens
  chr13:84455524-84455561
  hyper
  uterine vs. ovary
cgtgtaggtccccttctatctcattgcaggaacagat

SEQ ID NO: 481927 - DNA, 127 bp, Homo sapiens; identical to SEQ ID NO: 459410
  chr13:103046539-103046666
  hyper
  uterine vs. melanoma,ovary,sarcoma,thyroid,renal, anorectal,breast,multiple_myeloma,non_cancer

SEQ ID NO: 481928 - DNA, 1 bp, Homo sapiens
  chr13:103047328-103047329
  hyper
  uterine vs. melanoma,ovary,sarcoma,thyroid,renal, anorectal,breast,multiple_myeloma,non_cancer
c

SEQ ID NO: 481929 - DNA, 223 bp, Homo sapiens; identical to SEQ ID NO: 454169
  chr13:114776788-114777011
  hyper
  uterine vs. pancreas_gallbladder

SEQ ID NO: 481930 - DNA, 2 bp, Homo sapiens
  chr14:23834171-23834173
  hyper
  uterine vs. anorectal,head_and_neck,sarcoma
cg

SEQ ID NO: 481931 - DNA, 78 bp, Homo sapiens; identical to SEQ ID NO: 351523
  chr14:23835314-23835392
  hyper
  uterine vs. head_and_neck,cervical,anorectal,sarcoma, multiple_myeloma

SEQ ID NO: 481932 - DNA, 82 bp, Homo sapiens; identical to SEQ ID NO: 473758
  chr14:38060563-38060645
  hyper
  uterine vs. bladder_and_urothelial

SEQ ID NO: 481933 - DNA, 14 bp, Homo sapiens
  chr14:38061159-38061173
  hyper
  uterine vs. bladder_and_urothelial
cgccgccggccccc

SEQ ID NO: 481934 - DNA, 99 bp, Homo sapiens; identical to SEQ ID NO: 473760
  chr14:38061332-38061431
  hyper
  uterine vs. bladder_and_urothelial

SEQ ID NO: 481935 - DNA, 160 bp, Homo sapiens
  chr14:38677154-38677314
  hyper
  uterine vs. upper_gi,colorectal
cggaaaaactcgaatgtcgccctgccgttcctggggttggtgacaggtctggtcatcgcacggcggcagctcctcacctggatttagaagagctggcgtccccgcccgcccaagcctttaaactctcgtctgccagaacccgccaactctccagggtaca

SEQ ID NO: 481936 - DNA, 32 bp, Homo sapiens
  chr14:38677488-38677520
  hyper
  uterine vs. upper_gi,colorectal
agacacggggggctctgagcgctacgagcttt

SEQ ID NO: 481937 - DNA, 214 bp, Homo sapiens
  chr14:38677548-38677762
  hyper
  uterine vs. upper_gi,colorectal
ggtccctgaacactcccaatagcctaagctgcctgctgtgttatagcgcagaagcccctaacgcacggtggttgtcctttcttctcataacgctcgcagcttagggccagtttccgcgattctaagagtaattgcgtgggcacctgtgctggggccaggcgcaaagaagggagttggtctgcgcgaagatcgtcaacctgctaacagaccgcac

SEQ ID NO: 481938 - DNA, 198 bp, Homo sapiens; identical to SEQ ID NO: 360420
  chr14:38677790-38677988
  hyper
  uterine vs. upper_gi,colorectal

SEQ ID NO: 481939 - DNA, 27 bp, Homo sapiens
  chr14:38677493-38677520
  hyper
  uterine vs. upper_gi,colorectal
cggggggctctgagcgctacgagcttt

SEQ ID NO: 481940 - DNA, 214 bp, Homo sapiens; identical to SEQ ID NO: 481937
  chr14:38677548-38677762
  hyper
  uterine vs. upper_gi,colorectal

SEQ ID NO: 481941 - DNA, 383 bp, Homo sapiens
  chr14:38677790-38678173
  hyper
  uterine vs. upper_gi,colorectal
cagtctggaggttgcgcactttgggtaaggagggcccggaacttccctggcgggtctgagctgcaaggcaagcgagggtgggaagagggaatttagggttctggactgcgggacgggagagaagctggggtctccagagaaaagggcagcaatggagggaaactgagatgaactccagacatccatgttcatggatccgtttgagtctttgctttgggtaggagaggagtggaatgagacagaatctatacctttggttcccacccgccctccagtaaggccgaggaactctcttggttcctctgagagcaagaggcagatggtgctgcgagggaaccccggaaggagccactaaagttgagcagagtgcaggactgggaagg

SEQ ID NO: 481942 - DNA, 284 bp, Homo sapiens; identical to SEQ ID NO: 373410
  chr14:38678202-38678486
  hyper
  uterine vs. upper_gi,colorectal

SEQ ID NO: 481943 - DNA, 53 bp, Homo sapiens; identical to SEQ ID NO: 455691
  chr14:38725469-38725522
  hyper
  uterine vs. melanoma,myeloid_neoplasm,multiple_myeloma, non_cancer

SEQ ID NO: 481944 - DNA, 201 bp, Homo sapiens; identical to SEQ ID NO: 351548
  chr14:45431382-45431583
  hyper
  uterine vs. lung,ovary,breast,pancreas_gallbladder

SEQ ID NO: 481945 - DNA, 215 bp, Homo sapiens; identical to SEQ ID NO: 473766
  chr14:51562012-51562227
  hyper
  uterine vs. sarcoma

SEQ ID NO: 481946 - DNA, 538 bp, Homo sapiens
  chr14:54420542-54421080
  hyper
  uterine vs. pancreas_gallbladder
cgggagcgaggtcgggaaagtctcacccgcccaaagcctcaccaccgagaggcacttaaaaaggaaagcgcagagggaccctgcccacgcgcgtgtacacacacacccccccacacacacacaagcaaacacgagctccccgccacttcctccccagggtctcctcaaggccaaatattgctcccaatgacagccagtcaccccttggcgaacgcctgctaaggctccgaagagccgggccaccgatctagctcccggctgaaagcagccgaccttgtcacgcgcggggccgggaatgggagggagggtgttagagggtgatcgctgtgggaaagtgagagggagcggctgttagtcattgctccgggtccattaccgagaatccccaaacctagtccgccgctgcgtggcccctctccccatgcaaagcagacccccgaagaagccatgccaggctgagggacagacgccggggctcgaagctccgggcagattcagaaagaggcgtcgctgcagaaaggacgcatcacagttttca

SEQ ID NO: 481947 - DNA, 229 bp, Homo sapiens; identical to SEQ ID NO: 360437
  chr14:54421301-54421530
  hyper
  uterine vs. pancreas_gallbladder

SEQ ID NO: 481948 - DNA, 150 bp, Homo sapiens
  chr14:54421572-54421722
  hyper
  uterine vs. pancreas_gallbladder
cgctccggagctcaagaactcgggttgcctgccgccccactctccacgcacatacttggttttcttcttaggggcattggcaggtagactttgaggaagaaaagtaaaggatcgaacagctcagccctccctcccgaccgtggatgcccg

SEQ ID NO: 481949 - DNA, 18 bp, Homo sapiens
  chr14:54421784-54421802
  hyper
  uterine vs. pancreas_gallbladder
gcccggcaagagccgcgc

SEQ ID NO: 481950 - DNA, 511 bp, Homo sapiens
  chr14:54421831-54422342
  hyper
  uterine vs. pancreas_gallbladder
cgctggggcgggctgcgaaagggttgggaagagcaaagggtttttttgttttgttttgagacgcagaagccctttaaaaagcccggcgaggagaggtccagaagtagagaaagcagacggaggcaagctgtgcccgcggggcaaagggacagtagaaggggcgggcgcccgggttccccggaaaaccctcggccccaaggaatctcctggggcgggagagcgcggttctaaaaccgagaggataggaaggggaagggggagttgtgtttcaatttcggattcaccaggattcatctctagtcacatttttcttctcaaatttttaaatcgaaaagataaaagccaaaagaactttcatccccagagctttttattgggggaaaggaatgtaactcggggtggttgtccttcacttccctactcgaatcttctcctaatgccgaaatgtgtttacaggtagcctcagtttaccaagtatgtatcttttgggggtttaacctctcacaaagcc

SEQ ID NO: 481951 - DNA, 45 bp, Homo sapiens; identical to SEQ ID NO: 452878
  chr14:60385935-60385980
  hyper
  uterine vs. ovary,myeloid_neoplasm,thyroid

SEQ ID NO: 481952 - DNA, 7 bp, Homo sapiens
  chr14:60386737-60386744
  hyper
  uterine vs. ovary,myeloid_neoplasm,thyroid
caaaccc

SEQ ID NO: 481953 - DNA, 114 bp, Homo sapiens; identical to SEQ ID NO: 347307
  chr14:62584399-62584513
  hyper
  uterine vs. thyroid

SEQ ID NO: 481954 - DNA, 1 bp, Homo sapiens
  chr14:65006715-65006716
  hyper
  uterine vs. head_and_neck,renal
c

SEQ ID NO: 481955 - DNA, 536 bp, Homo sapiens; identical to SEQ ID NO: 452882
  chr14:65006776-65007312
  hyper
  uterine vs. head_and_neck,renal

SEQ ID NO: 481956 - DNA, 9 bp, Homo sapiens
  chr14:70654358-70654367
  hyper
  uterine vs. multiple_myeloma,thyroid,non_cancer,sarcoma, myeloid_neoplasm,renal
cgcgcgcgc

SEQ ID NO: 481957 - DNA, 619 bp, Homo sapiens; identical to SEQ ID NO: 475405
  chr14:73957523-73958142
  hyper
  uterine vs. lung,liver_bileduct,pancreas_gallbladder, head_and_neck,ovary,breast,upper_gi,colorectal, bladder_and_urothelial,renal,cervical,multiple_myeloma, anorectal

SEQ ID NO: 481958 - DNA, 338 bp, Homo sapiens; identical to SEQ ID NO: 475406
  chr14:73957804-73958142
  hyper
  uterine vs. lung,liver_bileduct,pancreas_gallbladder, head_and_neck,upper_gi,cervical,colorectal,breast, bladder_and_urothelial,renal,anorectal

SEQ ID NO: 481959 - DNA, 150 bp, Homo sapiens; identical to SEQ ID NO: 475407
  chr14:73958379-73958529
  hyper
  uterine vs. lung,liver_bileduct,pancreas_gallbladder, head_and_neck,upper_gi,cervical,colorectal,breast, bladder_and_urothelial,renal,anorectal

SEQ ID NO: 481960 - DNA, 164 bp, Homo sapiens
  chr14:88458964-88459128
  hyper
  uterine vs. ovary
atctccgcgatgaagacagcctgtgccccactgcctgggacgagggttccagccccggctacttcactacttagacctgtcactttactctctgcacctatactctctggacctccggatcctcatttgttcaaacctaactgcctgtctggttcgtgttaaac

SEQ ID NO: 481961 - DNA, 240 bp, Homo sapiens
  chr14:88459170-88459410
  hyper
  uterine vs. ovary
cgcctgctgactggcaccctaggggaatgcggcggagagtggagccggtggaaacgcagggcaacgccgcgggggcttgtggggctggccccacggggcgggctcttgccgccccccgcgtatccccgcagcttgccgctcaccccgccgccgctgaccgcgccgatgccgtcgaactcccggcccagcccgtcggagtcgtcgagcacgtacgcgccgccgggcgccagcagcgcacac

SEQ ID NO: 481962 - DNA, 57 bp, Homo sapiens; identical to SEQ ID NO: 351598
  chr14:88459631-88459688
  hyper
  uterine vs. ovary

SEQ ID NO: 481963 - DNA, 40 bp, Homo sapiens; identical to SEQ ID NO: 454180
  chr14:90849401-90849441
  hyper
  uterine vs. ovary,anorectal,upper_gi

SEQ ID NO: 481964 - DNA, 383 bp, Homo sapiens; identical to SEQ ID NO: 454181
  chr14:90849476-90849859
  hyper
  uterine vs. ovary,anorectal,upper_gi

SEQ ID NO: 481965 - DNA, 54 bp, Homo sapiens; identical to SEQ ID NO: 454182
  chr14:90849897-90849951
  hyper
  uterine vs. ovary,anorectal,upper_gi

SEQ ID NO: 481966 - DNA, 137 bp, Homo sapiens; identical to SEQ ID NO: 454183
  chr14:90849722-90849859
  hyper
  uterine vs. anorectal

SEQ ID NO: 481967 - DNA, 54 bp, Homo sapiens; identical to SEQ ID NO: 454182
  chr14:90849897-90849951
  hyper
  uterine vs. anorectal

SEQ ID NO: 481968 - DNA, 67 bp, Homo sapiens; identical to SEQ ID NO: 351606
  chr14:90850476-90850543
  hyper
  uterine vs. anorectal

SEQ ID NO: 481969 - DNA, 76 bp, Homo sapiens; identical to SEQ ID NO: 466440
  chr14:99736040-99736116
  hyper
  uterine vs. upper_gi

SEQ ID NO: 481970 - DNA, 61 bp, Homo sapiens; identical to SEQ ID NO: 466441
  chr14:99736213-99736274
  hyper
  uterine vs. upper_gi

SEQ ID NO: 481971 - DNA, 128 bp, Homo sapiens; identical to SEQ ID NO: 351618
  chr14:99736431-99736559
  hyper
  uterine vs. upper_gi

SEQ ID NO: 481972 - DNA, 206 bp, Homo sapiens; identical to SEQ ID NO: 373549
  chr14:100751380-100751586
  hyper
  uterine vs. lung

SEQ ID NO: 481973 - DNA, 35 bp, Homo sapiens
  chr14:103739884-103739919
  hyper
  uterine vs. myeloid_neoplasm
gggctgcagagactgggccgggcggaggagacccc

SEQ ID NO: 481974 - DNA, 84 bp, Homo sapiens; identical to SEQ ID NO: 360551
  chr14:103740611-103740695
  hyper
  uterine vs. myeloid_neoplasm

SEQ ID NO: 481975 - DNA, 78 bp, Homo sapiens; identical to SEQ ID NO: 345463
  chr14:105512395-105512473
  hyper
  uterine vs. head_and_neck,lymphoid_neoplasm,colorectal, anorectal,prostate,melanoma,sarcoma,upper_gi,thyroid, myeloid_neoplasm,breast,non_cancer,bladder_and_urothelial, multiple_myeloma,lung,renal,liver_bileduct,pancreas_gallbladder

SEQ ID NO: 481976 - DNA, 13 bp, Homo sapiens
  chr15:34806433-34806446
  hyper
  uterine vs. ovary
cgtgagccactgc

SEQ ID NO: 481977 - DNA, 235 bp, Homo sapiens; identical to SEQ ID NO: 476794
  chr15:34806641-34806876
  hyper
  uterine vs. ovary

SEQ ID NO: 481978 - DNA, 385 bp, Homo sapiens; identical to SEQ ID NO: 460730
  chr15:41786420-41786805
  hyper
  uterine vs. anorectal,upper_gi,colorectal

SEQ ID NO: 481979 - DNA, 28 bp, Homo sapiens
  chr15:41788111-41788139
  hyper
  uterine vs. colorectal
gcccaagcctgggtgtagagaccgcccc

SEQ ID NO: 481980 - DNA, 43 bp, Homo sapiens; identical to SEQ ID NO: 351664
  chr15:41788242-41788285
  hyper
  uterine vs. colorectal

SEQ ID NO: 481981 - DNA, 353 bp, Homo sapiens; identical to SEQ ID NO: 360616
  chr15:43622635-43622988
  hyper
  uterine vs. lung,pancreas_gallbladder,liver_bileduct

SEQ ID NO: 481982 - DNA, 124 bp, Homo sapiens; identical to SEQ ID NO: 345470
  chr15:45722474-45722598
  hyper
  uterine vs. renal,pancreas_gallbladder, bladder_and_urothelial,upper_gi,anorectal,breast,colorectal, prostate,multiple_myeloma,myeloid_neoplasm,non_cancer,thyroid, liver_bileduct,ovary,lung,cervical

SEQ ID NO: 481983 - DNA, 338 bp, Homo sapiens; identical to SEQ ID NO: 457559
  chr15:45722600-45722938
  hyper
  uterine vs. renal,pancreas_gallbladder, bladder_and_urothelial,upper_gi,anorectal,breast,colorectal, prostate,multiple_myeloma,myeloid_neoplasm,non_cancer,thyroid, liver_bileduct,ovary,lung,cervical

SEQ ID NO: 481984 - DNA, 228 bp, Homo sapiens; identical to SEQ ID NO: 457565
  chr15:53078992-53079220
  hyper
  uterine vs. multiple_myeloma,breast

SEQ ID NO: 481985 - DNA, 108 bp, Homo sapiens; identical to SEQ ID NO: 464225
  chr15:53080082-53080190
  hyper
  uterine vs. ovary

SEQ ID NO: 481986 - DNA, 839 bp, Homo sapiens; identical to SEQ ID NO: 454202
  chr15:80215691-80216530
  hyper
  uterine vs. lung,ovary

SEQ ID NO: 481987 - DNA, 99 bp, Homo sapiens; identical to SEQ ID NO: 351737
  chr15:88801240-88801339
  hyper
  uterine vs. ovary

SEQ ID NO: 481988 - DNA, 757 bp, Homo sapiens; identical to SEQ ID NO: 335233
  chr15:94774574-94775331
  hyper
  uterine vs. cervical

SEQ ID NO: 481989 - DNA, 48 bp, Homo sapiens; identical to SEQ ID NO: 345484
  chr16:2042503-2042551
  hyper
  uterine vs. anorectal

SEQ ID NO: 481990 - DNA, 5 bp, Homo sapiens
  chr16:3220283-3220288
  hyper
  uterine vs. thyroid,multiple_myeloma,ovary,non_cancer
cggcc

SEQ ID NO: 481991 - DNA, 212 bp, Homo sapiens; identical to SEQ ID NO: 345485
  chr16:3222239-3222451
  hyper
  uterine vs. non_cancer,multiple_myeloma,thyroid, myeloid_neoplasm,renal,lymphoid_neoplasm,bladder_and_urothelial, prostate

SEQ ID NO: 481992 - DNA, 12 bp, Homo sapiens
  chr16:10277411-10277423
  hyper
  uterine vs. ovary
cacaggcgcgcc

SEQ ID NO: 481993 - DNA, 10 bp, Homo sapiens
  chr16:23846783-23846793
  hyper
  uterine vs. non_cancer,thyroid
cgctcctccc

SEQ ID NO: 481994 - DNA, 281 bp, Homo sapiens; identical to SEQ ID NO: 473824
  chr16:54965796-54966077
  hyper
  uterine vs. breast

SEQ ID NO: 481995 - DNA, 107 bp, Homo sapiens; identical to SEQ ID NO: 454210
  chr16:54966659-54966766
  hyper
  uterine vs. breast

SEQ ID NO: 481996 - DNA, 107 bp, Homo sapiens; identical to SEQ ID NO: 454210
  chr16:54966659-54966766
  hyper
  uterine vs. cervical

SEQ ID NO: 481997 - DNA, 8 bp, Homo sapiens
  chr16:54967414-54967422
  hyper
  uterine vs. cervical
cgtgtccc

SEQ ID NO: 481998 - DNA, 29 bp, Homo sapiens
  chr16:56677568-56677597
  hyper
  uterine vs. colorectal,upper_gi
ccgcctcctaccggcccgcctgttttttc

SEQ ID NO: 481999 - DNA, 121 bp, Homo sapiens
  chr16:62068832-62068953
  hyper
  uterine vs. melanoma
cgctggtggaggcaaacggctagtccttgacatgccgccggctccgtgcctgcgggggaagggtcaaccgcaaggaaactttgaggattctgccagactgggtgggggaaggctctggtgt

SEQ ID NO: 482000 - DNA, 28 bp, Homo sapiens
  chr16:62068982-62069010
  hyper
  uterine vs. melanoma
atacctgttggcatcagcgttggcggca

SEQ ID NO: 482001 - DNA, 359 bp, Homo sapiens
  chr16:62069435-62069794
  hyper
  uterine vs. melanoma
agctgagccttggcccgcagccctgccgcgggggtcgccctccctcgcctcggagatgaggcggtgcagaaaaccagccatagaccactcgggccccctcgcctccttttttccctggcttgcaccctccgcacagcgggctgcaggtgcttcccattcaccgcacggaccccgcagtgaaggcgcgcggctgcagccgcgcctgcctgcgttgggaagcggcgaaatagccaagtcgccgcagggaaggaaaccggcaggaaaactggaggggcacagcctggagcttgctactctctaggatctgttgtcaaagcagtttgcaaaaacagtcaggcaaaaccttgaggcgtacgtac

SEQ ID NO: 482002 - DNA, 68 bp, Homo sapiens; identical to SEQ ID NO: 457592
  chr16:80574541-80574609
  hyper
  uterine vs. ovary

SEQ ID NO: 482003 - DNA, 72 bp, Homo sapiens; identical to SEQ ID NO: 345499
  chr16:80575052-80575124
  hyper
  uterine vs. ovary

SEQ ID NO: 482004 - DNA, 61 bp, Homo sapiens; identical to SEQ ID NO: 452921
  chr16:81779788-81779849
  hyper
  uterine vs. lymphoid_neoplasm,multiple_myeloma, bladder_and_urothelial,myeloid_neoplasm

SEQ ID NO: 482005 - DNA, 123 bp, Homo sapiens; identical to SEQ ID NO: 351847
  chr16:81780013-81780136
  hyper
  uterine vs. lymphoid_neoplasm,multiple_myeloma, bladder_and_urothelial,myeloid_neoplasm

SEQ ID NO: 482006 - DNA, 178 bp, Homo sapiens; identical to SEQ ID NO: 452923
  chr16:85932121-85932299
  hyper
  uterine vs. upper_gi,colorectal

SEQ ID NO: 482007 - DNA, 128 bp, Homo sapiens
  chr17:1957353-1957481
  hyper
  uterine vs. bladder_and_urothelial
cggggcggaggcggagcgtgggccgcggagatccggcgttcgcaggaggcttggtgcgcggcggggctgcacggggccacttccggagtagtactgcgagcagcggcgcgacagtgcggggtcccctt

SEQ ID NO: 482008 - DNA, 119 bp, Homo sapiens; identical to SEQ ID NO: 360929
  chr17:1957595-1957714
  hyper
  uterine vs. bladder_and_urothelial

SEQ ID NO: 482009 - DNA, 34 bp, Homo sapiens; identical to SEQ ID NO: 345503
  chr17:4981985-4982019
  hyper
  uterine vs. breast,ovary,prostate,anorectal,sarcoma, cervical,bladder_and_urothelial,non_cancer,renal,head_and_neck, pancreas_gallbladder,lung,myeloid_neoplasm,colorectal, multiple_myeloma,thyroid

SEQ ID NO: 482010 - DNA, 23 bp, Homo sapiens
  chr17:8055144-8055167
  hyper
  uterine vs. cervical,sarcoma,renal
cgtccaaccacacccctactact

SEQ ID NO: 482011 - DNA, 69 bp, Homo sapiens; identical to SEQ ID NO: 345505
  chr17:8055823-8055892
  hyper
  uterine vs. cervical,sarcoma,renal

SEQ ID NO: 482012 - DNA, 57 bp, Homo sapiens; identical to SEQ ID NO: 464269
  chr17:9143010-9143067
  hyper
  uterine vs. pancreas_gallbladder,cervical, bladder_and_urothelial,colorectal,breast

SEQ ID NO: 482013 - DNA, 187 bp, Homo sapiens; identical to SEQ ID NO: 464270
  chr17:9143110-9143297
  hyper
  uterine vs. pancreas_gallbladder,cervical, bladder_and_urothelial,colorectal,breast

SEQ ID NO: 482014 - DNA, 90 bp, Homo sapiens; identical to SEQ ID NO: 464271
  chr17:9143376-9143466
  hyper
  uterine vs. pancreas_gallbladder,cervical, bladder_and_urothelial,colorectal,breast

SEQ ID NO: 482015 - DNA, 34 bp, Homo sapiens; identical to SEQ ID NO: 464272
  chr17:9143504-9143538
  hyper
  uterine vs. pancreas_gallbladder,cervical, bladder_and_urothelial,colorectal,breast

SEQ ID NO: 482016 - DNA, 184 bp, Homo sapiens; identical to SEQ ID NO: 464273
  chr17:9143607-9143791
  hyper
  uterine vs. pancreas_gallbladder,cervical, bladder_and_urothelial,colorectal,breast

SEQ ID NO: 482017 - DNA, 265 bp, Homo sapiens
  chr17:15848879-15849144
  hyper
  uterine vs. cervical
catctgtgtcccgctcaggtgaggcgctcggcgtcgcccgaactcggggccccgtcggagctccgaaatgggtcgtcttctccaggccggggttcctccctcgggggccccagacgggccaggctgggggcgcgcggggcgcttggagggctggttcccagcctggccaccccgcaacgctagaccagtgcgcccgggcacccaagacatcccagatgcgcgtcgctctaaggagatctgcgtagggacagctctagggggtccg

SEQ ID NO: 482018 - DNA, 198 bp, Homo sapiens; identical to SEQ ID NO: 360969
  chr17:15849211-15849409
  hyper
  uterine vs. cervical

SEQ ID NO: 482019 - DNA, 49 bp, Homo sapiens; identical to SEQ ID NO: 472535
  chr17:16283879-16283928
  hyper
  uterine vs. upper_gi,liver_bileduct,lymphoid_neoplasm, breast,pancreas_gallbladder,lung,colorectal,renal,prostate, bladder_and_urothelial,myeloid_neoplasm,non_cancer, head_and_neck,multiple_myeloma

SEQ ID NO: 482020 - DNA, 675 bp, Homo sapiens; identical to SEQ ID NO: 472536
  chr17:16283956-16284631
  hyper
  uterine vs. upper_gi,liver_bileduct,lymphoid_neoplasm, breast,pancreas_gallbladder,lung,colorectal,renal,prostate, bladder_and_urothelial,myeloid_neoplasm,non_cancer, head_and_neck,multiple_myeloma

SEQ ID NO: 482021 - DNA, 389 bp, Homo sapiens; identical to SEQ ID NO: 472537
  chr17:16284242-16284631
  hyper
  uterine vs. liver_bileduct,lymphoid_neoplasm,upper_gi, breast,lung,bladder_and_urothelial,pancreas_gallbladder, prostate,colorectal,renal

SEQ ID NO: 482022 - DNA, 39 bp, Homo sapiens; identical to SEQ ID NO: 347411
  chr17:16285065-16285104
  hyper
  uterine vs. liver_bileduct,lymphoid_neoplasm,upper_gi, breast,lung,bladder_and_urothelial,pancreas_gallbladder, prostate,colorectal,renal

SEQ ID NO: 482023 - DNA, 363 bp, Homo sapiens; identical to SEQ ID NO: 335479
  chr17:18218758-18219121
  hyper
  uterine vs. cervical,lung,pancreas_gallbladder,renal, breast

SEQ ID NO: 482024 - DNA, 4 bp, Homo sapiens
  chr17:29335853-29335857
  hyper
  uterine vs. pancreas_gallbladder
cgcc

SEQ ID NO: 482025 - DNA, 112 bp, Homo sapiens
  chr17:32483881-32483993
  hyper
  uterine vs. ovary
cgccactagagacaagattaaaagcgagagcgagagagaaaatgcttaaaacaagtcgctgagcagctcggagcctgttaaccagcgcataatgccccatgttaaccatcct

SEQ ID NO: 482026 - DNA, 2 bp, Homo sapiens
  chr17:32484213-32484215
  hyper
  uterine vs. ovary
gc

SEQ ID NO: 482027 - DNA, 34 bp, Homo sapiens; identical to SEQ ID NO: 459470
  chr17:33775294-33775328
  hyper
  uterine vs. ovary,cervical

SEQ ID NO: 482028 - DNA, 912 bp, Homo sapiens; identical to SEQ ID NO: 335530
  chr17:37618442-37619354
  hyper
  uterine vs. lung

SEQ ID NO: 482029 - DNA, 85 bp, Homo sapiens
  chr17:42030245-42030330
  hyper
  uterine vs. cervical
cgggtttctggggtcgggagtgcgtatgcaaatgacgtgggcgtggttggcagatctcccaggaggcctcaggggtcctcaccac

SEQ ID NO: 482030 - DNA, 78 bp, Homo sapiens; identical to SEQ ID NO: 374142
  chr17:42030794-42030872
  hyper
  uterine vs. cervical

SEQ ID NO: 482031 - DNA, 231 bp, Homo sapiens; identical to SEQ ID NO: 455773
  chr17:42081919-42082150
  hyper
  uterine vs. upper_gi,colorectal,head_and_neck, pancreas_gallbladder,myeloid_neoplasm,renal,lung,anorectal

SEQ ID NO: 482032 - DNA, 321 bp, Homo sapiens; identical to SEQ ID NO: 347431
  chr17:42083719-42084040
  hyper
  uterine vs. colorectal,pancreas_gallbladder, head_and_neck,upper_gi,myeloid_neoplasm,anorectal, bladder_and_urothelial,renal,lung,cervical,non_cancer,prostate, thyroid,multiple_myeloma

SEQ ID NO: 482033 - DNA, 21 bp, Homo sapiens
  chr17:42091712-42091733
  hyper
  uterine vs. bladder_and_urothelial,lung, pancreas_gallbladder,upper_gi,liver_bileduct,colorectal, multiple_myeloma,non_cancer,renal,myeloid_neoplasm,prostate, melanoma,sarcoma,thyroid,head_and_neck,cervical,anorectal,
  CONT. FROM ABOVE: breast,lymphoid_neoplasm,ovary
cgaggcgctcaccttcagcca

SEQ ID NO: 482034 - DNA, 268 bp, Homo sapiens; identical to SEQ ID NO: 455775
  chr17:42091861-42092129
  hyper
  uterine vs. bladder_and_urothelial,lung, pancreas_gallbladder,upper_gi,liver_bileduct,colorectal, multiple_myeloma,non_cancer,renal,myeloid_neoplasm,prostate, melanoma,sarcoma,thyroid,head_and_neck,cervical,anorectal,
  CONT. FROM ABOVE: breast,lymphoid_neoplasm,ovary

SEQ ID NO: 482035 - DNA, 170 bp, Homo sapiens; identical to SEQ ID NO: 345520
  chr17:42092357-42092527
  hyper
  uterine vs. bladder_and_urothelial,lung, pancreas_gallbladder,upper_gi,liver_bileduct,colorectal, multiple_myeloma,non_cancer,renal,myeloid_neoplasm,prostate, melanoma,sarcoma,thyroid,head_and_neck,cervical,anorectal,
  CONT. FROM ABOVE: breast,lymphoid_neoplasm,ovary

SEQ ID NO: 482036 - DNA, 172 bp, Homo sapiens; identical to SEQ ID NO: 457614
  chr17:46801836-46802008
  hyper
  uterine vs. prostate

SEQ ID NO: 482037 - DNA, 325 bp, Homo sapiens; identical to SEQ ID NO: 455784
  chr17:46829655-46829980
  hyper
  uterine vs. multiple_myeloma,non_cancer,anorectal, thyroid

SEQ ID NO: 482038 - DNA, 106 bp, Homo sapiens; identical to SEQ ID NO: 455785
  chr17:46829874-46829980
  hyper
  uterine vs. anorectal,multiple_myeloma,non_cancer, thyroid

SEQ ID NO: 482039 - DNA, 45 bp, Homo sapiens; identical to SEQ ID NO: 351976
  chr17:46830655-46830700
  hyper
  uterine vs. anorectal,multiple_myeloma,non_cancer, thyroid

SEQ ID NO: 482040 - DNA, 80 bp, Homo sapiens; identical to SEQ ID NO: 455791
  chr17:58498618-58498698
  hyper
  uterine vs. anorectal,non_cancer,thyroid, myeloid_neoplasm,lymphoid_neoplasm,multiple_myeloma,sarcoma, cervical,renal,head_and_neck,bladder_and_urothelial, pancreas_gallbladder,prostate

SEQ ID NO: 482041 - DNA, 15 bp, Homo sapiens
  chr17:59532358-59532373
  hyper
  uterine vs. myeloid_neoplasm
actcctaggtttccg

SEQ ID NO: 482042 - DNA, 132 bp, Homo sapiens; identical to SEQ ID NO: 455793
  chr17:59532387-59532519
  hyper
  uterine vs. myeloid_neoplasm

SEQ ID NO: 482043 - DNA, 1 bp, Homo sapiens
  chr17:59532591-59532592
  hyper
  uterine vs. myeloid_neoplasm
c

SEQ ID NO: 482044 - DNA, 112 bp, Homo sapiens; identical to SEQ ID NO: 454237
  chr17:61777761-61777873
  hyper
  uterine vs. cervical,anorectal,sarcoma,multiple_myeloma, non_cancer,thyroid

SEQ ID NO: 482045 - DNA, 76 bp, Homo sapiens; identical to SEQ ID NO: 345537
  chr17:61778423-61778499
  hyper
  uterine vs. cervical,anorectal,sarcoma,multiple_myeloma, non_cancer,thyroid

SEQ ID NO: 482046 - DNA, 29 bp, Homo sapiens
  chr17:66434420-66434449
  hyper
  uterine vs. colorectal
cctggccccagccttagaagaggccactc

SEQ ID NO: 482047 - DNA, 81 bp, Homo sapiens; identical to SEQ ID NO: 454240
  chr17:73584287-73584368
  hyper
  uterine vs. cervical

SEQ ID NO: 482048 - DNA, 170 bp, Homo sapiens; identical to SEQ ID NO: 352021
  chr17:73584951-73585121
  hyper
  uterine vs. cervical

SEQ ID NO: 482049 - DNA, 136 bp, Homo sapiens; identical to SEQ ID NO: 335681
  chr17:74620111-74620247
  hyper
  uterine vs. liver_bileduct,bladder_and_urothelial,breast, lymphoid_neoplasm

SEQ ID NO: 482050 - DNA, 5 bp, Homo sapiens
  chr17:77216290-77216295
  hyper
  uterine vs. bladder_and_urothelial
cggct

SEQ ID NO: 482051 - DNA, 226 bp, Homo sapiens; identical to SEQ ID NO: 361158
  chr17:77216473-77216699
  hyper
  uterine vs. bladder_and_urothelial

SEQ ID NO: 482052 - DNA, 180 bp, Homo sapiens; identical to SEQ ID NO: 475508
  chr17:77786288-77786468
  hyper
  uterine vs. breast,anorectal

SEQ ID NO: 482053 - DNA, 61 bp, Homo sapiens; identical to SEQ ID NO: 352032
  chr17:77786805-77786866
  hyper
  uterine vs. breast,anorectal

SEQ ID NO: 482054 - DNA, 118 bp, Homo sapiens; identical to SEQ ID NO: 479344
  chr18:907197-907315
  hyper
  uterine vs. ovary

SEQ ID NO: 482055 - DNA, 585 bp, Homo sapiens; identical to SEQ ID NO: 454248
  chr18:5237294-5237879
  hyper
  uterine vs. lung,breast,melanoma,prostate,head_and_neck, sarcoma,liver_bileduct,ovary,pancreas_gallbladder,renal, colorectal,multiple_myeloma,anorectal,non_cancer,thyroid, cervical,bladder_and_urothelial,myeloid_neoplasm,upper_gi,
  CONT. FROM ABOVE: lymphoid_neoplasm

SEQ ID NO: 482056 - DNA, 21 bp, Homo sapiens
  chr18:5238247-5238268
  hyper
  uterine vs. lung,breast,melanoma,prostate,head_and_neck, sarcoma,liver_bileduct,ovary,pancreas_gallbladder,renal, colorectal,multiple_myeloma,anorectal,non_cancer,thyroid, cervical,bladder_and_urothelial,myeloid_neoplasm,upper_gi,
  CONT. FROM ABOVE: lymphoid_neoplasm
gctggcccgggagcgttcgcc

SEQ ID NO: 482057 - DNA, 87 bp, Homo sapiens; identical to SEQ ID NO: 454250
  chr18:5237792-5237879
  hyper
  uterine vs. lung,breast,prostate,sarcoma,renal, pancreas_gallbladder,liver_bileduct,multiple_myeloma,non_cancer, head_and_neck,colorectal,thyroid,myeloid_neoplasm,ovary, cervical,upper_gi,melanoma,lymphoid_neoplasm,anorectal

SEQ ID NO: 482058 - DNA, 537 bp, Homo sapiens; identical to SEQ ID NO: 345540
  chr18:5238247-5238784
  hyper
  uterine vs. lung,breast,prostate,sarcoma,renal, pancreas_gallbladder,liver_bileduct,multiple_myeloma,non_cancer, head_and_neck,colorectal,thyroid,myeloid_neoplasm,ovary, cervical,upper_gi,melanoma,lymphoid_neoplasm,anorectal

SEQ ID NO: 482059 - DNA, 3 bp, Homo sapiens
  chr18:9708731-9708734
  hyper
  uterine vs. cervical
cgg

SEQ ID NO: 482060 - DNA, 202 bp, Homo sapiens; identical to SEQ ID NO: 352061
  chr18:9709406-9709608
  hyper
  uterine vs. cervical

SEQ ID NO: 482061 - DNA, 190 bp, Homo sapiens
  chr18:11148436-11148626
  hyper
  uterine vs. multiple_myeloma
cagagcccttcactttgttaagaagtcccccacccaggcgcccccctcgtcctcctcaagtgccctcggaaagcggaccagactcacctactgccaggcagatgggcagcagcagcctgaagatgagcccgcacaccacttctgaggccatcgcgtcggtccggcgagtcggagcagaggggcgaggctc

SEQ ID NO: 482062 - DNA, 19 bp, Homo sapiens
  chr18:11149256-11149275
  hyper
  uterine vs. sarcoma
ggggtgggagctgccaggc

SEQ ID NO: 482063 - DNA, 201 bp, Homo sapiens
  chr18:11149298-11149499
  hyper
  uterine vs. sarcoma
cggggctcgccttgtgggtccggtgcgcgggcggcgctgcgagtccctccctcactcgaaggaacggcgcgagcgtggggagaaatggagaccagagcgcatatcgggtgagtgggtctcccactccctcctccaccgcctcaatttaaaactcaagagaaaaaccagcgccgtcccgtcgcccagcgcgaccaccgcctg

SEQ ID NO: 482064 - DNA, 19 bp, Homo sapiens
  chr18:11149256-11149275
  hyper
  uterine vs. sarcoma,myeloid_neoplasm
ggggtgggagctgccaggc

SEQ ID NO: 482065 - DNA, 201 bp, Homo sapiens; identical to SEQ ID NO: 482063
  chr18:11149298-11149499
  hyper
  uterine vs. sarcoma,myeloid_neoplasm

SEQ ID NO: 482066 - DNA, 145 bp, Homo sapiens
  chr18:28622129-28622274
  hyper
  uterine vs. head_and_neck
gagggggcagcccctaaatcccttttcaagtctgtgctttgagctctcagggatcctctccacccaaaggcgccctccaaccaccatcaccaccagctccaccacctggggagaagcgtgaatcccaaccccctgcccaacccgc

SEQ ID NO: 482067 - DNA, 29 bp, Homo sapiens
  chr18:32074293-32074322
  hyper
  uterine vs. ovary
tgcctgggtgggagtgggctccgggcccc

SEQ ID NO: 482068 - DNA, 96 bp, Homo sapiens; identical to SEQ ID NO: 361247
  chr18:32074337-32074433
  hyper
  uterine vs. ovary

SEQ ID NO: 482069 - DNA, 291 bp, Homo sapiens; identical to SEQ ID NO: 452955
  chr18:32557542-32557833
  hyper
  uterine vs. upper_gi

SEQ ID NO: 482070 - DNA, 18 bp, Homo sapiens
  chr18:32557864-32557882
  hyper
  uterine vs. upper_gi
tctgaacctggggcgctc

SEQ ID NO: 482071 - DNA, 45 bp, Homo sapiens; identical to SEQ ID NO: 452954
  chr18:32557884-32557929
  hyper
  uterine vs. upper_gi

SEQ ID NO: 482072 - DNA, 445 bp, Homo sapiens; identical to SEQ ID NO: 345550
  chr18:32558003-32558448
  hyper
  uterine vs. upper_gi

SEQ ID NO: 482073 - DNA, 4 bp, Homo sapiens
  chr18:35145982-35145986
  hyper
  uterine vs. lung,breast
cgtt

SEQ ID NO: 482074 - DNA, 412 bp, Homo sapiens; identical to SEQ ID NO: 466721
  chr18:35146241-35146653
  hyper
  uterine vs. lung,breast

SEQ ID NO: 482075 - DNA, 80 bp, Homo sapiens; identical to SEQ ID NO: 452959
  chr18:44335955-44336035
  hyper
  uterine vs. sarcoma,myeloid_neoplasm

SEQ ID NO: 482076 - DNA, 14 bp, Homo sapiens
  chr18:44337138-44337152
  hyper
  uterine vs. sarcoma,thyroid,myeloid_neoplasm,non_cancer
caggggctgggcgc

SEQ ID NO: 482077 - DNA, 401 bp, Homo sapiens
  chr18:44787851-44788252
  hyper
  uterine vs. melanoma
catcaccccacccttcacccctccatgcccagtggtcgaaggaggacagatatgaggcgagggctggaggcctagtaattgaagtaggaccaggggcaggagggagcaatccgccctgggggcgcgcagcctgggccggcagcttgaactcccttgccagaagggttgtcccaggacgcgcaggtgcgcttctcctgtgccgccctagggcagtccactaggagggggcaccatttccacactttcccggggaacgaccacctgaggtgagatgagaacctattgtgcgtctccaggaggggagctgggaagattggatacggaagactgagcccttctcagcatctccaggaaggaaagctttagggccaaacataggctgctttaaaaaaaaaaaaaaa

SEQ ID NO: 482078 - DNA, 257 bp, Homo sapiens; identical to SEQ ID NO: 374410
  chr18:44788281-44788538
  hyper
  uterine vs. melanoma

SEQ ID NO: 482079 - DNA, 196 bp, Homo sapiens; identical to SEQ ID NO: 452964
  chr18:47339411-47339607
  hyper
  uterine vs. pancreas_gallbladder,liver_bileduct, colorectal,upper_gi

SEQ ID NO: 482080 - DNA, 401 bp, Homo sapiens; identical to SEQ ID NO: 452965
  chr18:47339758-47340159
  hyper
  uterine vs. pancreas_gallbladder,liver_bileduct, colorectal,upper_gi

SEQ ID NO: 482081 - DNA, 209 bp, Homo sapiens
  chr18:49868091-49868300
  hyper
  uterine vs. liver_bileduct
cggagctggcggcttcgacggccaaaagaatagaaaagagcaaaatgactcatgataaggtccacttgttttgcgggacctcaccgcaagtgtagatgggcactggggtacagtgagcggtcctggcaaagaaggagaggagagcggctggatgagcattcagagagcccttcggaaacgacctttttccaaatccaaaggaaaaacag

SEQ ID NO: 482082 - DNA, 316 bp, Homo sapiens
  chr18:49868356-49868672
  hyper
  uterine vs. liver_bileduct
aacagggaatggcacatcaatcgcggccaagcccccagcctccccggagtccgcagctccggctttctcttctctgctaagtgctgcatggccaagggttgcgaacgcgagcagaaaatgcgcctctcactgtcgcgagggattcagacagtcaagcgccaaggcagcccgaggctccccaaagcctcgctcggccgcacgcgggcaggaatctgcgcttgcactcgggctcagctcctcatcttcctttggccagagacagagagagcaggcaggaggggtgtgtgtgtgtgcgtgtgtgtgtgtgtgtgtgtgc

SEQ ID NO: 482083 - DNA, 21 bp, Homo sapiens
  chr18:49868767-49868788
  hyper
  uterine vs. liver_bileduct
ctcccctggctcttctctccc

SEQ ID NO: 482084 - DNA, 45 bp, Homo sapiens; identical to SEQ ID NO: 455808
  chr18:53446783-53446828
  hyper
  uterine vs. anorectal

SEQ ID NO: 482085 - DNA, 82 bp, Homo sapiens; identical to SEQ ID NO: 480539
  chr18:61603403-61603485
  hyper
  uterine vs. bladder_and_urothelial

SEQ ID NO: 482086 - DNA, 201 bp, Homo sapiens; identical to SEQ ID NO: 480540
  chr18:61603701-61603902
  hyper
  uterine vs. bladder_and_urothelial

SEQ ID NO: 482087 - DNA, 208 bp, Homo sapiens; identical to SEQ ID NO: 352115
  chr18:61603985-61604193
  hyper
  uterine vs. bladder_and_urothelial

SEQ ID NO: 482088 - DNA, 138 bp, Homo sapiens; identical to SEQ ID NO: 452971
  chr18:70210281-70210419
  hyper
  uterine vs. ovary

SEQ ID NO: 482089 - DNA, 53 bp, Homo sapiens; identical to SEQ ID NO: 452972
  chr18:70210508-70210561
  hyper
  uterine vs. ovary

SEQ ID NO: 482090 - DNA, 406 bp, Homo sapiens; identical to SEQ ID NO: 454268
  chr19:603411-603817
  hyper
  uterine vs. renal

SEQ ID NO: 482091 - DNA, 159 bp, Homo sapiens; identical to SEQ ID NO: 352129
  chr19:603846-604005
  hyper
  uterine vs. renal

SEQ ID NO: 482092 - DNA, 15 bp, Homo sapiens
  chr19:1856948-1856963
  hyper
  uterine vs. colorectal,myeloid_neoplasm,multiple_myeloma, upper_gi
cggggtggggggggc

SEQ ID NO: 482093 - DNA, 109 bp, Homo sapiens; identical to SEQ ID NO: 345559
  chr19:1857456-1857565
  hyper
  uterine vs. colorectal,myeloid_neoplasm,multiple_myeloma, upper_gi

SEQ ID NO: 482094 - DNA, 116 bp, Homo sapiens; identical to SEQ ID NO: 345560
  chr19:1979018-1979134
  hyper
  uterine vs. liver_bileduct,melanoma,lymphoid_neoplasm, renal

SEQ ID NO: 482095 - DNA, 66 bp, Homo sapiens; identical to SEQ ID NO: 459508
  chr19:6590260-6590326
  hyper
  uterine vs. multiple_myeloma,renal,non_cancer, lymphoid_neoplasm

SEQ ID NO: 482096 - DNA, 323 bp, Homo sapiens; identical to SEQ ID NO: 361399
  chr19:6590881-6591204
  hyper
  uterine vs. multiple_myeloma,renal,non_cancer, lymphoid_neoplasm

SEQ ID NO: 482097 - DNA, 212 bp, Homo sapiens; identical to SEQ ID NO: 455816
  chr19:10197461-10197673
  hyper
  uterine vs. cervical,bladder_and_urothelial

SEQ ID NO: 482098 - DNA, 4 bp, Homo sapiens
  chr19:10197819-10197823
  hyper
  uterine vs. cervical,bladder_and_urothelial
cccc

SEQ ID NO: 482099 - DNA, 24 bp, Homo sapiens
  chr19:10397603-10397627
  hyper
  uterine vs. non_cancer,myeloid_neoplasm,multiple_myeloma, thyroid
cgaggaggcggggctgcgggcctc

SEQ ID NO: 482100 - DNA, 116 bp, Homo sapiens; identical to SEQ ID NO: 452980
  chr19:10691764-10691880
  hyper
  uterine vs. melanoma,lymphoid_neoplasm

SEQ ID NO: 482101 - DNA, 261 bp, Homo sapiens; identical to SEQ ID NO: 335980
  chr19:12807005-12807266
  hyper
  uterine vs. lung

SEQ ID NO: 482102 - DNA, 190 bp, Homo sapiens; identical to SEQ ID NO: 455820
  chr19:13213427-13213617
  hyper
  uterine vs. cervical,pancreas_gallbladder, bladder_and_urothelial,upper_gi,colorectal,anorectal

SEQ ID NO: 482103 - DNA, 112 bp, Homo sapiens; identical to SEQ ID NO: 345573
  chr19:13213834-13213946
  hyper
  uterine vs. cervical,pancreas_gallbladder, bladder_and_urothelial,upper_gi,colorectal,anorectal

SEQ ID NO: 482104 - DNA, 224 bp, Homo sapiens; identical to SEQ ID NO: 455822
  chr19:13983612-13983836
  hyper
  uterine vs. upper_gi,pancreas_gallbladder

SEQ ID NO: 482105 - DNA, 434 bp, Homo sapiens; identical to SEQ ID NO: 455823
  chr19:13983865-13984299
  hyper
  uterine vs. upper_gi,pancreas_gallbladder

SEQ ID NO: 482106 - DNA, 106 bp, Homo sapiens; identical to SEQ ID NO: 459516
  chr19:17392397-17392503
  hyper
  uterine vs. anorectal,multiple_myeloma, bladder_and_urothelial

SEQ ID NO: 482107 - DNA, 133 bp, Homo sapiens; identical to SEQ ID NO: 455836
  chr19:17958343-17958476
  hyper
  uterine vs. lymphoid_neoplasm,multiple_myeloma, non_cancer

SEQ ID NO: 482108 - DNA, 75 bp, Homo sapiens; identical to SEQ ID NO: 457698
  chr19:19932106-19932181
  hyper
  uterine vs. ovary,prostate,bladder_and_urothelial, sarcoma,breast,renal,thyroid,colorectal,non_cancer,lung, pancreas_gallbladder

SEQ ID NO: 482109 - DNA, 8 bp, Homo sapiens
  chr19:19932385-19932393
  hyper
  uterine vs. ovary,prostate,bladder_and_urothelial, sarcoma,breast,renal,thyroid,colorectal,non_cancer,lung, pancreas_gallbladder
gggatgtc

SEQ ID NO: 482110 - DNA, 1 bp, Homo sapiens
  chr19:19932505-19932506
  hyper
  uterine vs. bladder_and_urothelial,ovary,sarcoma, prostate,breast,renal,pancreas_gallbladder,non_cancer, colorectal,melanoma,multiple_myeloma,lung
c

SEQ ID NO: 482111 - DNA, 694 bp, Homo sapiens; identical to SEQ ID NO: 452995
  chr19:19976556-19977250
  hyper
  uterine vs. bladder_and_urothelial,breast,ovary, pancreas_gallbladder,liver_bileduct

SEQ ID NO: 482112 - DNA, 35 bp, Homo sapiens; identical to SEQ ID NO: 345584
  chr19:19977294-19977329
  hyper
  uterine vs. bladder_and_urothelial,breast,ovary, pancreas_gallbladder,liver_bileduct

SEQ ID NO: 482113 - DNA, 68 bp, Homo sapiens; identical to SEQ ID NO: 347581
  chr19:23598868-23598936
  hyper
  uterine vs. ovary

SEQ ID NO: 482114 - DNA, 39 bp, Homo sapiens
  chr19:35168869-35168908
  hyper
  uterine vs. lung
cgcggggtgatgacggcgccgacctcttggcactgttgt

SEQ ID NO: 482115 - DNA, 97 bp, Homo sapiens
  chr19:35168992-35169089
  hyper
  uterine vs. lung
aaccttgaacaaatgggttcagtatctcggaatttcagttttgtcttcattttaaaaaataaatctggtttagaactcgacctcaagcgatccgccc

SEQ ID NO: 482116 - DNA, 4 bp, Homo sapiens
  chr19:36909065-36909069
  hyper
  uterine vs. sarcoma
cgcc

SEQ ID NO: 482117 - DNA, 4 bp, Homo sapiens
  chr19:37288206-37288210
  hyper
  uterine vs. ovary,myeloid_neoplasm,sarcoma,prostate
cgtg

SEQ ID NO: 482118 - DNA, 3 bp, Homo sapiens
  chr19:37288807-37288810
  hyper
  uterine vs. ovary,myeloid_neoplasm,sarcoma,prostate
acc

SEQ ID NO: 482119 - DNA, 86 bp, Homo sapiens; identical to SEQ ID NO: 457749
  chr19:38719834-38719920
  hyper
  uterine vs. ovary

SEQ ID NO: 482120 - DNA, 264 bp, Homo sapiens; identical to SEQ ID NO: 457750
  chr19:38719956-38720220
  hyper
  uterine vs. ovary

SEQ ID NO: 482121 - DNA, 187 bp, Homo sapiens; identical to SEQ ID NO: 352306
  chr19:38720439-38720626
  hyper
  uterine vs. ovary

SEQ ID NO: 482122 - DNA, 92 bp, Homo sapiens
  chr19:44405817-44405909
  hyper
  uterine vs. melanoma,breast,prostate
cgccccgttcacgccctgggtcttctggtcttcagcgcctctcatcctcaccgccggttccattccaaccagggactgtggaagcctccgct

SEQ ID NO: 482123 - DNA, 48 bp, Homo sapiens; identical to SEQ ID NO: 352322
  chr19:44406123-44406171
  hyper
  uterine vs. melanoma,breast,prostate

SEQ ID NO: 482124 - DNA, 68 bp, Homo sapiens; identical to SEQ ID NO: 345595
  chr19:44711963-44712031
  hyper
  uterine vs. pancreas_gallbladder

SEQ ID NO: 482125 - DNA, 3 bp, Homo sapiens
  chr19:45655296-45655299
  hyper
  uterine vs. anorectal,cervical,sarcoma
cgg

SEQ ID NO: 482126 - DNA, 118 bp, Homo sapiens; identical to SEQ ID NO: 454295
  chr19:45656461-45656579
  hyper
  uterine vs. cervical,anorectal,sarcoma

SEQ ID NO: 482127 - DNA, 201 bp, Homo sapiens; identical to SEQ ID NO: 454296
  chr19:45656461-45656662
  hyper
  uterine vs. anorectal

SEQ ID NO: 482128 - DNA, 4 bp, Homo sapiens
  chr19:46379840-46379844
  hyper
  uterine vs. pancreas_gallbladder
cgcc

SEQ ID NO: 482129 - DNA, 3 bp, Homo sapiens
  chr19:50393295-50393298
  hyper
  uterine vs. cervical
cgc

SEQ ID NO: 482130 - DNA, 89 bp, Homo sapiens; identical to SEQ ID NO: 476922
  chr19:50836203-50836292
  hyper
  uterine vs. cervical,anorectal,melanoma, bladder_and_urothelial,non_cancer,breast,prostate, liver_bileduct,thyroid,lung,head_and_neck,pancreas_gallbladder, renal,myeloid_neoplasm,lymphoid_neoplasm,multiple_myeloma,ovary,
  CONT. FROM ABOVE: colorectal,upper_gi

SEQ ID NO: 482131 - DNA, 589 bp, Homo sapiens; identical to SEQ ID NO: 476923
  chr19:50836451-50837040
  hyper
  uterine vs. cervical,anorectal,melanoma, bladder_and_urothelial,non_cancer,breast,prostate, liver_bileduct,thyroid,lung,head_and_neck,pancreas_gallbladder, renal,myeloid_neoplasm,lymphoid_neoplasm,multiple_myeloma,ovary,
  CONT. FROM ABOVE: colorectal,upper_gi

SEQ ID NO: 482132 - DNA, 431 bp, Homo sapiens; identical to SEQ ID NO: 478316
  chr19:50836609-50837040
  hyper
  uterine vs. cervical,anorectal,colorectal,melanoma, bladder_and_urothelial,breast,lung,prostate,liver_bileduct, non_cancer,pancreas_gallbladder,renal,thyroid,head_and_neck, myeloid_neoplasm,ovary,sarcoma,multiple_myeloma

SEQ ID NO: 482133 - DNA, 88 bp, Homo sapiens; identical to SEQ ID NO: 345604
  chr19:50837389-50837477
  hyper
  uterine vs. cervical,anorectal,colorectal,melanoma, bladder_and_urothelial,breast,lung,prostate,liver_bileduct, non_cancer,pancreas_gallbladder,renal,thyroid,head_and_neck, myeloid_neoplasm,ovary,sarcoma,multiple_myeloma

SEQ ID NO: 482134 - DNA, 38 bp, Homo sapiens; identical to SEQ ID NO: 457811
  chr19:58094924-58094962
  hyper
  uterine vs. prostate,myeloid_neoplasm

SEQ ID NO: 482135 - DNA, 146 bp, Homo sapiens; identical to SEQ ID NO: 453082
  chr19:58280766-58280912
  hyper
  uterine vs. bladder_and_urothelial,breast,melanoma, multiple_myeloma

SEQ ID NO: 482136 - DNA, 176 bp, Homo sapiens; identical to SEQ ID NO: 352434
  chr19:58281371-58281547
  hyper
  uterine vs. bladder_and_urothelial,breast,melanoma, multiple_myeloma

SEQ ID NO: 482137 - DNA, 44 bp, Homo sapiens
  chr19:58739694-58739738
  hyper
  uterine vs. ovary,breast
cgactgagcgatcacctaggacgaatcgcctccagttagcgtgc

SEQ ID NO: 482138 - DNA, 1 bp, Homo sapiens
  chr19:58952140-58952141
  hyper
  uterine vs. sarcoma,thyroid,prostate,myeloid_neoplasm
c

SEQ ID NO: 482139 - DNA, 178 bp, Homo sapiens; identical to SEQ ID NO: 345000
  chr2:10588876-10589054
  hyper
  uterine vs. liver_bileduct

SEQ ID NO: 482140 - DNA, 117 bp, Homo sapiens; identical to SEQ ID NO: 455869
  chr2:10589056-10589173
  hyper
  uterine vs. liver_bileduct

SEQ ID NO: 482141 - DNA, 197 bp, Homo sapiens; identical to SEQ ID NO: 345002
  chr2:10589298-10589495
  hyper
  uterine vs. liver_bileduct

SEQ ID NO: 482142 - DNA, 142 bp, Homo sapiens; identical to SEQ ID NO: 478324
  chr2:19563170-19563312
  hyper
  uterine vs. ovary

SEQ ID NO: 482143 - DNA, 67 bp, Homo sapiens; identical to SEQ ID NO: 357116
  chr2:19563433-19563500
  hyper
  uterine vs. ovary

SEQ ID NO: 482144 - DNA, 511 bp, Homo sapiens; identical to SEQ ID NO: 453094
  chr2:21022197-21022708
  hyper
  uterine vs. liver_bileduct,renal,bladder_and_urothelial, lymphoid_neoplasm,sarcoma,pancreas_gallbladder,upper_gi, colorectal,myeloid_neoplasm,thyroid,melanoma,lung,non_cancer, multiple_myeloma,breast

SEQ ID NO: 482145 - DNA, 52 bp, Homo sapiens; identical to SEQ ID NO: 462675
  chr2:29033285-29033337
  hyper
  uterine vs. sarcoma,anorectal,thyroid,breast

SEQ ID NO: 482146 - DNA, 9 bp, Homo sapiens
  chr2:40679688-40679697
  hyper
  uterine vs. ovary
cgcctaccc

SEQ ID NO: 482147 - DNA, 77 bp, Homo sapiens; identical to SEQ ID NO: 454316
  chr2:42720186-42720263
  hyper
  uterine vs. cervical

SEQ ID NO: 482148 - DNA, 64 bp, Homo sapiens; identical to SEQ ID NO: 454317
  chr2:43019535-43019599
  hyper
  uterine vs. cervical,anorectal,myeloid_neoplasm,sarcoma, non_cancer,colorectal,head_and_neck,pancreas_gallbladder, lymphoid_neoplasm,thyroid,liver_bileduct,renal,multiple_myeloma

SEQ ID NO: 482149 - DNA, 70 bp, Homo sapiens; identical to SEQ ID NO: 346432
  chr2:43020503-43020573
  hyper
  uterine vs. cervical,anorectal,myeloid_neoplasm,thyroid, non_cancer,renal,liver_bileduct,sarcoma,colorectal, multiple_myeloma,pancreas_gallbladder,head_and_neck, lymphoid_neoplasm

SEQ ID NO: 482150 - DNA, 368 bp, Homo sapiens; identical to SEQ ID NO: 466893
  chr2:43864730-43865098
  hyper
  uterine vs. ovary

SEQ ID NO: 482151 - DNA, 183 bp, Homo sapiens
  chr2:50573865-50574048
  hyper
  uterine vs. sarcoma
tgcaataggcactgaatgatgcttgctgctgccatggaaatggtggatgtggtgcgctcccaaactggatgccccccacgccactcctaggaggccgctgagggtgagcgggactatccaaagcagggccaggcgcccccctgcgccgccgccgccgccgccgccgccgccgcccccgggcga

SEQ ID NO: 482152 - DNA, 213 bp, Homo sapiens; identical to SEQ ID NO: 331326
  chr2:67624288-67624501
  hyper
  uterine vs. lung,pancreas_gallbladder,liver_bileduct

SEQ ID NO: 482153 - DNA, 100 bp, Homo sapiens; identical to SEQ ID NO: 357230
  chr2:80549811-80549911
  hyper
  uterine vs. myeloid_neoplasm

SEQ ID NO: 482154 - DNA, 20 bp, Homo sapiens
  chr2:91635403-91635423
  hyper
  uterine vs. melanoma
cttttggtgaccgccgccac

SEQ ID NO: 482155 - DNA, 251 bp, Homo sapiens; identical to SEQ ID NO: 459580
  chr2:96192254-96192505
  hyper
  uterine vs. liver_bileduct,lung,pancreas_gallbladder, breast,prostate,sarcoma,multiple_myeloma,ovary

SEQ ID NO: 482156 - DNA, 193 bp, Homo sapiens; identical to SEQ ID NO: 346462
  chr2:96192624-96192817
  hyper
  uterine vs. liver_bileduct,lung,pancreas_gallbladder, breast,prostate,sarcoma,multiple_myeloma,ovary

SEQ ID NO: 482157 - DNA, 22 bp, Homo sapiens
  chr2:113341835-113341857
  hyper
  uterine vs. bladder_and_urothelial,pancreas_gallbladder, renal,melanoma,liver_bileduct,multiple_myeloma,prostate,breast, sarcoma,anorectal,cervical,ovary,upper_gi,lung,non_cancer, thyroid,lymphoid_neoplasm,head_and_neck
cggagatttggagcgcttgtgt

SEQ ID NO: 482158 - DNA, 554 bp, Homo sapiens; identical to SEQ ID NO: 345037
  chr2:113341898-113342452
  hyper
  uterine vs. bladder_and_urothelial,pancreas_gallbladder, renal,melanoma,liver_bileduct,multiple_myeloma,prostate,breast, sarcoma,anorectal,cervical,ovary,upper_gi,lung,non_cancer, thyroid,lymphoid_neoplasm,head_and_neck

SEQ ID NO: 482159 - DNA, 31 bp, Homo sapiens; identical to SEQ ID NO: 453113
  chr2:118981062-118981093
  hyper
  uterine vs. thyroid,non_cancer,multiple_myeloma

SEQ ID NO: 482160 - DNA, 154 bp, Homo sapiens; identical to SEQ ID NO: 331428
  chr2:121834588-121834742
  hyper
  uterine vs. upper_gi

SEQ ID NO: 482161 - DNA, 6 bp, Homo sapiens
  chr2:127535179-127535185
  hyper
  uterine vs. melanoma,breast,sarcoma
aagggc

SEQ ID NO: 482162 - DNA, 49 bp, Homo sapiens; identical to SEQ ID NO: 453114
  chr2:127782995-127783044
  hyper
  uterine vs. renal

SEQ ID NO: 482163 - DNA, 69 bp, Homo sapiens; identical to SEQ ID NO: 357317
  chr2:139538166-139538235
  hyper
  uterine vs. bladder_and_urothelial

SEQ ID NO: 482164 - DNA, 691 bp, Homo sapiens
  chr2:159825046-159825737
  hyper
  uterine vs. lung
cgcgagaggaaggtgccttcgggaacacgcgcaagggcggggattcgcgctgccaatgaggccccggtgtgggccgagcaaggcggggggacgggccggagcggaggctttgctgtggcagctgctggagcggcggccgcctcgggagccggaggagaggcagccgcggagcgccgagctggcctcgccccgaggcccggccctgggtgtggggaaccgcgctgaggagctggaaactttcccggcaggtaactcccgcagcccggactccgccgcgggcctgcgagcgccccgggcatggccagctgccagtgtgcggagaggtcgagagggacccggggtggagagggtgatgggagaagggaaaggcgtgtgggaaagtttctggagcgccccctcctccgccgggcacacccgggagctttccgggaataggcacagacatgttgggcgccccgggccttggtctctcggcggctttggggagtccgcaccttccttgcgcggttcccccgcgccggaccgagccggcctcccctggaaccggtgtggtgggaaccgggaacgcttggggcacgctcgagttctgggaccacccccgcccggcgcgcccgctcgccccctttcccgccttctctgtagccctcgggcttggcaagggcctgggctacgcctggtacctggcgcgggg

SEQ ID NO: 482165 - DNA, 244 bp, Homo sapiens; identical to SEQ ID NO: 466982
  chr2:171570957-171571201
  hyper
  uterine vs. cervical

SEQ ID NO: 482166 - DNA, 21 bp, Homo sapiens
  chr2:171571244-171571265
  hyper
  uterine vs. cervical
gccccaccggggatctcgctt

SEQ ID NO: 482167 - DNA, 178 bp, Homo sapiens; identical to SEQ ID NO: 349622
  chr2:171671978-171672156
  hyper
  uterine vs. myeloid_neoplasm

SEQ ID NO: 482168 - DNA, 353 bp, Homo sapiens; identical to SEQ ID NO: 331547
  chr2:178483339-178483692
  hyper
  uterine vs. lung,bladder_and_urothelial,liver_bileduct, pancreas_gallbladder,breast,lymphoid_neoplasm,colorectal, head_and_neck,cervical,melanoma,upper_gi,prostate,renal,sarcoma, anorectal,multiple_myeloma,non_cancer

SEQ ID NO: 482169 - DNA, 486 bp, Homo sapiens; identical to SEQ ID NO: 331549
  chr2:179343487-179343973
  hyper
  uterine vs. lung

SEQ ID NO: 482170 - DNA, 111 bp, Homo sapiens; identical to SEQ ID NO: 331580
  chr2:201727391-201727502
  hyper
  uterine vs. lung

SEQ ID NO: 482171 - DNA, 11 bp, Homo sapiens
  chr2:207139040-207139051
  hyper
  uterine vs. melanoma
cggaaacgact

SEQ ID NO: 482172 - DNA, 5 bp, Homo sapiens
  chr2:225906006-225906011
  hyper
cggat

SEQ ID NO: 482173 - DNA, 237 bp, Homo sapiens; identical to SEQ ID NO: 459601
  chr2:225906168-225906405
  hyper

SEQ ID NO: 482174 - DNA, 77 bp, Homo sapiens; identical to SEQ ID NO: 454345
  chr2:225906328-225906405
  hyper

SEQ ID NO: 482175 - DNA, 210 bp, Homo sapiens; identical to SEQ ID NO: 331640
  chr2:227700369-227700579
  hyper
  uterine vs. cervical,anorectal,breast,upper_gi, head_and_neck

SEQ ID NO: 482176 - DNA, 157 bp, Homo sapiens; identical to SEQ ID NO: 464463
  chr2:231902837-231902994
  hyper
  uterine vs. liver_bileduct

SEQ ID NO: 482177 - DNA, 17 bp, Homo sapiens
  chr20:2668754-2668771
  hyper
  uterine vs. bladder_and_urothelial
cggggatctgacaggaa

SEQ ID NO: 482178 - DNA, 68 bp, Homo sapiens; identical to SEQ ID NO: 457912
  chr20:3052452-3052520
  hyper
  uterine vs. thyroid,pancreas_gallbladder,head_and_neck, non_cancer,anorectal,upper_gi,renal,myeloid_neoplasm,sarcoma, bladder_and_urothelial

SEQ ID NO: 482179 - DNA, 206 bp, Homo sapiens; identical to SEQ ID NO: 453161
  chr20:21080357-21080563
  hyper
  uterine vs. colorectal,thyroid,non_cancer, lymphoid_neoplasm,myeloid_neoplasm,multiple_myeloma,upper_gi

SEQ ID NO: 482180 - DNA, 185 bp, Homo sapiens; identical to SEQ ID NO: 457915
  chr20:21086682-21086867
  hyper
  uterine vs. ovary,anorectal,thyroid

SEQ ID NO: 482181 - DNA, 205 bp, Homo sapiens; identical to SEQ ID NO: 352470
  chr20:25065526-25065731
  hyper
  uterine vs. sarcoma

SEQ ID NO: 482182 - DNA, 62 bp, Homo sapiens; identical to SEQ ID NO: 453168
  chr20:30639044-30639106
  hyper
  uterine vs. multiple_myeloma

SEQ ID NO: 482183 - DNA, 139 bp, Homo sapiens; identical to SEQ ID NO: 453169
  chr20:30639494-30639633
  hyper
  uterine vs. multiple_myeloma

SEQ ID NO: 482184 - DNA, 139 bp, Homo sapiens; identical to SEQ ID NO: 453169
  chr20:30639494-30639633
  hyper
  uterine vs. anorectal

SEQ ID NO: 482185 - DNA, 165 bp, Homo sapiens; identical to SEQ ID NO: 472562
  chr20:48771177-48771342
  hyper
  uterine vs. melanoma

SEQ ID NO: 482186 - DNA, 4 bp, Homo sapiens
  chr20:50157660-50157664
  hyper
  uterine vs. anorectal
cgtg

SEQ ID NO: 482187 - DNA, 316 bp, Homo sapiens; identical to SEQ ID NO: 455940
  chr20:50158039-50158355
  hyper
  uterine vs. anorectal

SEQ ID NO: 482188 - DNA, 8 bp, Homo sapiens
  chr20:50722201-50722209
  hyper
  uterine vs. anorectal
gtgcgcac

SEQ ID NO: 482189 - DNA, 297 bp, Homo sapiens; identical to SEQ ID NO: 455941
  chr20:50722302-50722599
  hyper
  uterine vs. anorectal

SEQ ID NO: 482190 - DNA, 148 bp, Homo sapiens; identical to SEQ ID NO: 375146
  chr20:54578794-54578942
  hyper
  uterine vs. melanoma

SEQ ID NO: 482191 - DNA, 136 bp, Homo sapiens; identical to SEQ ID NO: 459635
  chr20:55206463-55206599
  hyper
  uterine vs. cervical,breast

SEQ ID NO: 482192 - DNA, 4 bp, Homo sapiens
  chr20:55206736-55206740
  hyper
  uterine vs. cervical,breast
cgag

SEQ ID NO: 482193 - DNA, 95 bp, Homo sapiens; identical to SEQ ID NO: 352515
  chr20:55206774-55206869
  hyper
  uterine vs. cervical,breast

SEQ ID NO: 482194 - DNA, 1 bp, Homo sapiens
  chr20:57089405-57089406
  hyper
  uterine vs. bladder_and_urothelial
c

SEQ ID NO: 482195 - DNA, 174 bp, Homo sapiens; identical to SEQ ID NO: 361924
  chr20:57090173-57090347
  hyper
  uterine vs. bladder_and_urothelial

SEQ ID NO: 482196 - DNA, 1 bp, Homo sapiens
  chr20:57224597-57224598
  hyper
  uterine vs. myeloid_neoplasm,thyroid,multiple_myeloma, non_cancer,bladder_and_urothelial,prostate,lymphoid_neoplasm, pancreas_gallbladder
c

SEQ ID NO: 482197 - DNA, 113 bp, Homo sapiens; identical to SEQ ID NO: 345643
  chr20:57225466-57225579
  hyper
  uterine vs. myeloid_neoplasm,thyroid,multiple_myeloma, non_cancer,bladder_and_urothelial,prostate,lymphoid_neoplasm, pancreas_gallbladder

SEQ ID NO: 482198 - DNA, 379 bp, Homo sapiens; identical to SEQ ID NO: 375185
  chr20:62384600-62384979
  hyper
  uterine vs. breast

SEQ ID NO: 482199 - DNA, 466 bp, Homo sapiens; identical to SEQ ID NO: 347700
  chr21:30374936-30375402
  hyper
  uterine vs. liver_bileduct,pancreas_gallbladder,lung, upper_gi,renal,colorectal,sarcoma

SEQ ID NO: 482200 - DNA, 211 bp, Homo sapiens; identical to SEQ ID NO: 454354
  chr21:38592864-38593075
  hyper
  uterine vs. pancreas_gallbladder

SEQ ID NO: 482201 - DNA, 259 bp, Homo sapiens; identical to SEQ ID NO: 454355
  chr21:38593104-38593363
  hyper
  uterine vs. pancreas_gallbladder

SEQ ID NO: 482202 - DNA, 38 bp, Homo sapiens; identical to SEQ ID NO: 361982
  chr21:38593729-38593767
  hyper
  uterine vs. pancreas_gallbladder

SEQ ID NO: 482203 - DNA, 141 bp, Homo sapiens
  chr21:38936049-38936190
  hyper
  uterine vs. melanoma,lung,ovary,pancreas_gallbladder, breast,renal
cgggggccgcgagccgccggcgtaggccgctccagctggaagaccccaccgctagggttccagggggctgcggacgcttccgaggggcccaaggcgaaagaacgcagcccgcttgtcggccacgtgaccgtccccgtccgc

SEQ ID NO: 482204 - DNA, 144 bp, Homo sapiens; identical to SEQ ID NO: 347704
  chr21:38936266-38936410
  hyper
  uterine vs. melanoma,lung,ovary,pancreas_gallbladder, breast,renal

SEQ ID NO: 482205 - DNA, 820 bp, Homo sapiens; identical to SEQ ID NO: 467145
  chr21:42879240-42880060
  hyper
  uterine vs. ovary

SEQ ID NO: 482206 - DNA, 41 bp, Homo sapiens; identical to SEQ ID NO: 467146
  chr21:42880104-42880145
  hyper
  uterine vs. ovary

SEQ ID NO: 482207 - DNA, 217 bp, Homo sapiens
  chr21:46351437-46351654
  hyper
  uterine vs. multiple_myeloma,sarcoma
ggaaattcattatgggaatgtgcgcgttgtggagatgctcagaccgcgaacagtactgcgggaacccaaacgatcatttttaaccccagacgtccctgaaccaaagccaaagtctacaggtcactggggcagaggccgcccgaaaccagctgtcccctcccggcctaggcgcgccaggtccccgcccagccggggcgatcctttggtcggacagtga

SEQ ID NO: 482208 - DNA, 35 bp, Homo sapiens; identical to SEQ ID NO: 469070
  chr21:46351619-46351654
  hyper
  uterine vs. sarcoma,multiple_myeloma,prostate

SEQ ID NO: 482209 - DNA, 323 bp, Homo sapiens; identical to SEQ ID NO: 352573
  chr21:46352279-46352602
  hyper
  uterine vs. sarcoma,multiple_myeloma,prostate

SEQ ID NO: 482210 - DNA, 395 bp, Homo sapiens; identical to SEQ ID NO: 455949
  chr21:46352279-46352674
  hyper
  uterine vs. anorectal

SEQ ID NO: 482211 - DNA, 23 bp, Homo sapiens
  chr21:46352868-46352891
  hyper
  uterine vs. anorectal
cagcagaggacggggccggggcc

SEQ ID NO: 482212 - DNA, 187 bp, Homo sapiens; identical to SEQ ID NO: 295268
  chr22:24552924-24553111
  hyper

SEQ ID NO: 482213 - DNA, 97 bp, Homo sapiens; identical to SEQ ID NO: 455955
  chr22:27053098-27053195
  hyper
  uterine vs. ovary

SEQ ID NO: 482214 - DNA, 268 bp, Homo sapiens; identical to SEQ ID NO: 455956
  chr22:27053250-27053518
  hyper
  uterine vs. ovary

SEQ ID NO: 482215 - DNA, 81 bp, Homo sapiens; identical to SEQ ID NO: 462790
  chr22:27053437-27053518
  hyper
  uterine vs. ovary

SEQ ID NO: 482216 - DNA, 230 bp, Homo sapiens; identical to SEQ ID NO: 352595
  chr22:27054028-27054258
  hyper
  uterine vs. ovary

SEQ ID NO: 482217 - DNA, 300 bp, Homo sapiens; identical to SEQ ID NO: 480765
  chr22:27068622-27068922
  hyper
  uterine vs. lymphoid_neoplasm,pancreas_gallbladder, melanoma,prostate,sarcoma,renal,bladder_and_urothelial,lung, multiple_myeloma

SEQ ID NO: 482218 - DNA, 1 bp, Homo sapiens
  chr22:27069238-27069239
  hyper
  uterine vs. lymphoid_neoplasm,pancreas_gallbladder, melanoma,prostate,sarcoma,renal,bladder_and_urothelial,lung, multiple_myeloma
c

SEQ ID NO: 482219 - DNA, 791 bp, Homo sapiens; identical to SEQ ID NO: 362059
  chr22:34316250-34317041
  hyper
  uterine vs. lung,upper_gi

SEQ ID NO: 482220 - DNA, 14 bp, Homo sapiens
  chr22:42354024-42354038
  hyper
  uterine vs. multiple_myeloma,lymphoid_neoplasm, colorectal,pancreas_gallbladder,non_cancer
gcctgggccctccc

SEQ ID NO: 482221 - DNA, 28 bp, Homo sapiens
  chr22:50623263-50623291
  hyper
  uterine vs. myeloid_neoplasm,multiple_myeloma,non_cancer, sarcoma,thyroid,prostate,renal
cgccagcgccaggtcagccaagaacccg

SEQ ID NO: 482222 - DNA, 15 bp, Homo sapiens
  chr22:50624022-50624037
  hyper
  uterine vs. myeloid_neoplasm,multiple_myeloma,non_cancer, sarcoma,thyroid,prostate,renal
ctgtggacgccgtgc

SEQ ID NO: 482223 - DNA, 9 bp, Homo sapiens
  chr3:238187-238196
  hyper
  uterine vs. ovary
cgacctgtg

SEQ ID NO: 482224 - DNA, 110 bp, Homo sapiens
  chr3:2139600-2139710
  hyper
  uterine vs. ovary
cggttaccccgaggtgtggagttgcggcgaagggagccacttctgcaaggaaacagtagattcataatgtagaatgaccgtggcaacgtcgttcaaagcacattctttcg

SEQ ID NO: 482225 - DNA, 44 bp, Homo sapiens
  chr3:2141396-2141440
  hyper
  uterine vs. ovary,breast
ctggggggtttccagtttctttcgagaggcaagacaaccgcccc

SEQ ID NO: 482226 - DNA, 55 bp, Homo sapiens
  chr3:2141396-2141451
  hyper
  uterine vs. ovary,breast
ctggggggtttccagtttctttcgagaggcaagacaaccgccccgtcccctcccc

SEQ ID NO: 482227 - DNA, 244 bp, Homo sapiens; identical to SEQ ID NO: 349723
  chr3:2141539-2141783
  hyper
  uterine vs. ovary,breast

SEQ ID NO: 482228 - DNA, 82 bp, Homo sapiens; identical to SEQ ID NO: 480782
  chr3:3840349-3840431
  hyper
  uterine vs. ovary

SEQ ID NO: 482229 - DNA, 191 bp, Homo sapiens
  chr3:6902672-6902863
  hyper
  uterine vs. ovary
cagtggggagggctggcgctgggaagggtggggagagaaggagagccagcgagggagggagggagtgggaggaggaggagagggagccgaacgaccatttaaagcgatagcagtccctgccctctccccagtgctgggctgttggagagagcgagcagcaagccggtgagcgcgagcgcggcgcgccggcc

SEQ ID NO: 482230 - DNA, 41 bp, Homo sapiens
  chr3:6902929-6902970
  hyper
  uterine vs. ovary
cgcccctccccggattcccccaccctccgtgcctgcaggag

SEQ ID NO: 482231 - DNA, 76 bp, Homo sapiens; identical to SEQ ID NO: 357538
  chr3:6903188-6903264
  hyper
  uterine vs. ovary

SEQ ID NO: 482232 - DNA, 4 bp, Homo sapiens
  chr3:9904708-9904712
  hyper
  uterine vs. bladder_and_urothelial,colorectal,upper_gi, anorectal,cervical,pancreas_gallbladder,non_cancer
ggcc

SEQ ID NO: 482233 - DNA, 413 bp, Homo sapiens; identical to SEQ ID NO: 455963
  chr3:10206343-10206756
  hyper
  uterine vs. bladder_and_urothelial,upper_gi, liver_bileduct,anorectal,sarcoma,pancreas_gallbladder,renal, prostate,non_cancer,myeloid_neoplasm,thyroid,colorectal,lung, multiple_myeloma,head_and_neck,cervical,melanoma

SEQ ID NO: 482234 - DNA, 370 bp, Homo sapiens; identical to SEQ ID NO: 455964
  chr3:16553609-16553979
  hyper
  uterine vs. lymphoid_neoplasm,multiple_myeloma, myeloid_neoplasm,sarcoma,renal,non_cancer,thyroid, bladder_and_urothelial

SEQ ID NO: 482235 - DNA, 78 bp, Homo sapiens; identical to SEQ ID NO: 345081
  chr3:16555426-16555504
  hyper
  uterine vs. ovary,lymphoid_neoplasm,sarcoma,anorectal

SEQ ID NO: 482236 - DNA, 90 bp, Homo sapiens; identical to SEQ ID NO: 370051
  chr3:19190216-19190306
  hyper
  uterine vs. ovary,colorectal

SEQ ID NO: 482237 - DNA, 14 bp, Homo sapiens
  chr3:35680722-35680736
  hyper
  uterine vs. ovary
cgcgggcgcccggc

SEQ ID NO: 482238 - DNA, 64 bp, Homo sapiens; identical to SEQ ID NO: 349753
  chr3:35681641-35681705
  hyper
  uterine vs. ovary

SEQ ID NO: 482239 - DNA, 953 bp, Homo sapiens
  chr3:37033979-37034932
  hyper
  uterine vs. head_and_neck,cervical,lymphoid_neoplasm, lung,pancreas_gallbladder,liver_bileduct,bladder_and_urothelial, prostate,breast,anorectal,sarcoma,renal,upper_gi, multiple_myeloma,non_cancer,myeloid_neoplasm,melanoma,ovary
cgcggataaagaccaggaggtagttctcataggccacaaaagcctggtcgtccaaggcaagagaataggctttaaagtccctggctcggttaaaaagctggttgcgtagattcctgtcaatgctcaggatcctctgccttgtgatatctggagataagtcaacgccttgcaggacgcttacatgctcgggcagtacctctctcagcaacacctccatgcactggtatacaaagtccccctcaccccagccgcgacccttcaaggccaagaggcggcagagcccgaggcctgcacgagcagctctctcttcaggagtgaaggaggccacgggcaagtcgccctgacgcagacgctccaccagggccgcgcgctcgccgtccgccacataccgctcgtagtattcgtgctcagcctcgtagtggcgcctgacgtcgcgttcgcgggtagctacgatgaggcggcgacagaccaggcacagggccccatcgccctccggaggctccaccaccaaataacgctgggtccactcgggccggaaaactagagcctcgtcgacttccatcttgcttcttttgggcgtcatccacattctgcgggaggccacaagagcagggccaacgttagaaaggccgcaaggggagaggaggagcctgagaagcgccaagcacctcctccgctctgcgccagatcacctcagcagaggcacacaagcccggttccggcatctctgctcctattggctggatatttcgtattccccgagctcctaaaaacgaaccaataggaagagcggacagcgatctctaacgcgcaagcgcatatccttctaggtagcgggcagtagccgcttcagggagggacgaagagacccagcaacccacagagttgagaaatttgactggcattcaagctgtccaatcaatagctgccgctgaagggtggggctggatggc

SEQ ID NO: 482240 - DNA, 959 bp, Homo sapiens
  chr3:37034440-37035399
  hyper
  uterine vs. lung,head_and_neck,lymphoid_neoplasm, cervical,ovary,pancreas_gallbladder,bladder_and_urothelial, breast,liver_bileduct,prostate,anorectal,sarcoma,renal, multiple_myeloma,upper_gi,myeloid_neoplasm,non_cancer,thyroid,
  CONT. FROM ABOVE: melanoma,colorectal
cgacagaccaggcacagggccccatcgccctccggaggctccaccaccaaataacgctgggtccactcgggccggaaaactagagcctcgtcgacttccatcttgcttcttttgggcgtcatccacattctgcgggaggccacaagagcagggccaacgttagaaaggccgcaaggggagaggaggagcctgagaagcgccaagcacctcctccgctctgcgccagatcacctcagcagaggcacacaagcccggttccggcatctctgctcctattggctggatatttcgtattccccgagctcctaaaaacgaaccaataggaagagcggacagcgatctctaacgcgcaagcgcatatccttctaggtagcgggcagtagccgcttcagggagggacgaagagacccagcaacccacagagttgagaaatttgactggcattcaagctgtccaatcaatagctgccgctgaagggtggggctggatggcgtaagctacagctgaaggaagaacgtgagcacgaggcactgaggtgattggctgaaggcacttccgttgagcatctagacgtttccttggctcttctggcgccaaaatgtcgttcgtggcaggggttattcggcggctggacgagacagtggtgaaccgcatcgcggcgggggaagttatccagcggccagctaatgctatcaaagagatgattgagaactggtacggagggagtcgagccgggctcacttaagggctacgacttaacgggccgcgtcactcaatggcgcggacacgcctctttgcccgggcagaggcatgtacagcgcatgcccacaacggcggaggccgccgggttccctgacgtgccagtcaggccttctccttttccgcagaccgtgtgtttctttaccgctctcccccgagaccttttaagggttgtttggagtgtaagtggaggaatatac

SEQ ID NO: 482241 - DNA, 87 bp, Homo sapiens; identical to SEQ ID NO: 370086
  chr3:42947961-42948048
  hyper
  uterine vs. myeloid_neoplasm

SEQ ID NO: 482242 - DNA, 156 bp, Homo sapiens; identical to SEQ ID NO: 469117
  chr3:44039193-44039349
  hyper
  uterine vs. ovary

SEQ ID NO: 482243 - DNA, 71 bp, Homo sapiens; identical to SEQ ID NO: 346560
  chr3:44597031-44597102
  hyper
  uterine vs. ovary

SEQ ID NO: 482244 - DNA, 550 bp, Homo sapiens; identical to SEQ ID NO: 331751
  chr3:44666348-44666898
  hyper
  uterine vs. lung,ovary

SEQ ID NO: 482245 - DNA, 157 bp, Homo sapiens; identical to SEQ ID NO: 357599
  chr3:44771093-44771250
  hyper
  uterine vs. ovary,sarcoma

SEQ ID NO: 482246 - DNA, 82 bp, Homo sapiens; identical to SEQ ID NO: 454369
  chr3:50377892-50377974
  hyper
  uterine vs. anorectal

SEQ ID NO: 482247 - DNA, 167 bp, Homo sapiens; identical to SEQ ID NO: 346566
  chr3:50378002-50378169
  hyper
  uterine vs. anorectal

SEQ ID NO: 482248 - DNA, 447 bp, Homo sapiens; identical to SEQ ID NO: 453205
  chr3:62859445-62859892
  hyper
  uterine vs. colorectal

SEQ ID NO: 482249 - DNA, 206 bp, Homo sapiens; identical to SEQ ID NO: 453206
  chr3:62859964-62860170
  hyper
  uterine vs. colorectal

SEQ ID NO: 482250 - DNA, 136 bp, Homo sapiens; identical to SEQ ID NO: 457987
  chr3:62859756-62859892
  hyper
  uterine vs. colorectal

SEQ ID NO: 482251 - DNA, 206 bp, Homo sapiens; identical to SEQ ID NO: 453206
  chr3:62859964-62860170
  hyper
  uterine vs. colorectal

SEQ ID NO: 482252 - DNA, 225 bp, Homo sapiens; identical to SEQ ID NO: 370126
  chr3:62861325-62861550
  hyper
  uterine vs. melanoma

SEQ ID NO: 482253 - DNA, 267 bp, Homo sapiens
  chr3:87841792-87842059
  hyper
  uterine vs. ovary
ggggcgtccgcccacccgcaggcgccccggacccgcaagggcggcgcaagacttccccagcgcgcagtcagcgtcgcggccccgaaagctggcgacaggcgctgctgtcttcccgccccgtggggtcgcccctgccctcccgcgccccggggctgggggcgccaccttgccagctccgactgctgcagggagcgccaggggtgagtgtgcggatcagcgctgagcccgggagtgcgggtcacgcccgcagctggcgcgcaggtgggg

SEQ ID NO: 482254 - DNA, 434 bp, Homo sapiens; identical to SEQ ID NO: 331822
  chr3:100120034-100120468
  hyper
  uterine vs. lung,ovary,upper_gi

SEQ ID NO: 482255 - DNA, 289 bp, Homo sapiens; identical to SEQ ID NO: 455980
  chr3:127794860-127795149
  hyper
  uterine vs. cervical

SEQ ID NO: 482256 - DNA, 44 bp, Homo sapiens; identical to SEQ ID NO: 345102
  chr3:127795229-127795273
  hyper
  uterine vs. cervical

SEQ ID NO: 482257 - DNA, 334 bp, Homo sapiens; identical to SEQ ID NO: 454378
  chr3:128216313-128216647
  hyper
  uterine vs. upper_gi,melanoma,head_and_neck,colorectal, pancreas_gallbladder,prostate,anorectal,sarcoma,lung,breast, multiple_myeloma,renal,liver_bileduct,non_cancer, myeloid_neoplasm,thyroid,cervical

SEQ ID NO: 482258 - DNA, 378 bp, Homo sapiens; identical to SEQ ID NO: 345104
  chr3:128216713-128217091
  hyper
  uterine vs. upper_gi,melanoma,head_and_neck,colorectal, pancreas_gallbladder,prostate,anorectal,sarcoma,lung,breast, multiple_myeloma,renal,liver_bileduct,non_cancer, myeloid_neoplasm,thyroid,cervical

SEQ ID NO: 482259 - DNA, 49 bp, Homo sapiens; identical to SEQ ID NO: 453213
  chr3:129694299-129694348
  hyper
  uterine vs. multiple_myeloma,non_cancer,prostate, myeloid_neoplasm

SEQ ID NO: 482260 - DNA, 49 bp, Homo sapiens; identical to SEQ ID NO: 453213
  chr3:129694299-129694348
  hyper
  uterine vs. sarcoma

SEQ ID NO: 482261 - DNA, 192 bp, Homo sapiens; identical to SEQ ID NO: 458012
  chr3:137480764-137480956
  hyper
  uterine vs. sarcoma

SEQ ID NO: 482262 - DNA, 130 bp, Homo sapiens; identical to SEQ ID NO: 349838
  chr3:147075091-147075221
  hyper
  uterine vs. prostate

SEQ ID NO: 482263 - DNA, 380 bp, Homo sapiens; identical to SEQ ID NO: 469152
  chr3:147086665-147087045
  hyper
  uterine vs. prostate

SEQ ID NO: 482264 - DNA, 40 bp, Homo sapiens
  chr3:147087005-147087045
  hyper
  uterine vs. multiple_myeloma,thyroid
cgtttctggtagcagaaagctaataataataaataaaatc

SEQ ID NO: 482265 - DNA, 61 bp, Homo sapiens; identical to SEQ ID NO: 478504
  chr3:147088567-147088628
  hyper
  uterine vs. prostate

SEQ ID NO: 482266 - DNA, 100 bp, Homo sapiens; identical to SEQ ID NO: 357716
  chr3:147088653-147088753
  hyper
  uterine vs. prostate

SEQ ID NO: 482267 - DNA, 97 bp, Homo sapiens; identical to SEQ ID NO: 357717
  chr3:147111702-147111799
  hyper
  uterine vs. multiple_myeloma,prostate

SEQ ID NO: 482268 - DNA, 347 bp, Homo sapiens; identical to SEQ ID NO: 455989
  chr3:147138422-147138769
  hyper
  uterine vs. prostate,myeloid_neoplasm,thyroid

SEQ ID NO: 482269 - DNA, 84 bp, Homo sapiens; identical to SEQ ID NO: 349845
  chr3:153840393-153840477
  hyper
  uterine vs. sarcoma,breast,lung

SEQ ID NO: 482270 - DNA, 64 bp, Homo sapiens; identical to SEQ ID NO: 453219
  chr3:154797121-154797185
  hyper
  uterine vs. ovary

SEQ ID NO: 482271 - DNA, 121 bp, Homo sapiens; identical to SEQ ID NO: 453220
  chr3:154797214-154797335
  hyper
  uterine vs. ovary

SEQ ID NO: 482272 - DNA, 185 bp, Homo sapiens
  chr3:157260928-157261113
  hyper
  uterine vs. bladder_and_urothelial,pancreas_gallbladder, colorectal,upper_gi,renal,lung,prostate,breast
cgaggcggggtgggggaggtcgtgtcccagggttctgacagtggagccaggacgtccgggagctgacaatctaaacgcgacctgggaaggggcggtagcgggagtggctgcttcctgggaggtggtgctcgcaaacctggcagctgactgggtggggcgtgccttccctggcagtcgcggagggg

SEQ ID NO: 482273 - DNA, 4 bp, Homo sapiens
  chr3:157812151-157812155
  hyper
  uterine vs. non_cancer,thyroid
cgca

SEQ ID NO: 482274 - DNA, 31 bp, Homo sapiens; identical to SEQ ID NO: 357740
  chr3:157828149-157828180
  hyper
  uterine vs. lung

SEQ ID NO: 482275 - DNA, 20 bp, Homo sapiens
  chr3:158288800-158288820
  hyper
  uterine vs. lung
cgaaaagctccccggccggc

SEQ ID NO: 482276 - DNA, 2 bp, Homo sapiens
  chr3:158288886-158288888
  hyper
  uterine vs. lung
cg

SEQ ID NO: 482277 - DNA, 173 bp, Homo sapiens; identical to SEQ ID NO: 349858
  chr3:158289012-158289185
  hyper
  uterine vs. lung

SEQ ID NO: 482278 - DNA, 228 bp, Homo sapiens
  chr3:169482182-169482410
  hyper
  uterine vs. breast,pancreas_gallbladder,prostate, colorectal,upper_gi,multiple_myeloma,lymphoid_neoplasm,renal, cervical,myeloid_neoplasm,thyroid,non_cancer,melanoma,anorectal, lung,bladder_and_urothelial,sarcoma,liver_bileduct,
  CONT. FROM ABOVE: head_and_neck
cggaagacgggagaacccacgcaggaacggctccaggcaaccccggctcactgcccattcattttggccgactttggaggtgccttcacgtctcctgccaatttgcagcacactggcccagtcagtcaggtttgggggttcacaagcccccattgccggcgaggggtgacggatgcgcacgatcggcgttccccccaccaacaggaaagcgaactgcatgtgtgagcc

SEQ ID NO: 482279 - DNA, 242 bp, Homo sapiens
  chr3:169482439-169482681
  hyper
  uterine vs. breast,pancreas_gallbladder,prostate, colorectal,upper_gi,multiple_myeloma,lymphoid_neoplasm,renal, cervical,myeloid_neoplasm,thyroid,non_cancer,melanoma,anorectal, lung,bladder_and_urothelial,sarcoma,liver_bileduct,
  CONT. FROM ABOVE: head_and_neck
ggaatcgcgccgcgcgcggggactcgctccgttcctcttcctgcggcctgaaaggcctgaacctcgccctcgcccccgagagacccgcggctgacagagcccaactcttcgcggtggcagtgggtgcctccggagaagccccgggccgaccgcggcctccaggcggggttcgggggctgggcaggcgacccgccgcaggtccccgggaggggcgaacgggccagcagctgacattttttgtt

SEQ ID NO: 482280 - DNA, 283 bp, Homo sapiens; identical to SEQ ID NO: 453224
  chr3:170626174-170626457
  hyper
  uterine vs. colorectal

SEQ ID NO: 482281 - DNA, 26 bp, Homo sapiens
  chr3:170626710-170626736
  hyper
  uterine vs. colorectal
aggtttgttgcgttcgggtcgcagtc

SEQ ID NO: 482282 - DNA, 108 bp, Homo sapiens; identical to SEQ ID NO: 453226
  chr3:170626349-170626457
  hyper
  uterine vs. colorectal

SEQ ID NO: 482283 - DNA, 508 bp, Homo sapiens; identical to SEQ ID NO: 357752
  chr3:170626710-170627218
  hyper
  uterine vs. colorectal

SEQ ID NO: 482284 - DNA, 4 bp, Homo sapiens
  chr3:180319831-180319835
  hyper
  uterine vs. ovary,pancreas_gallbladder,breast,melanoma, bladder_and_urothelial,multiple_myeloma,prostate,liver_bileduct
cgta

SEQ ID NO: 482285 - DNA, 135 bp, Homo sapiens; identical to SEQ ID NO: 458030
  chr3:180319921-180320056
  hyper
  uterine vs. ovary,pancreas_gallbladder,breast,melanoma, bladder_and_urothelial,multiple_myeloma,prostate,liver_bileduct

SEQ ID NO: 482286 - DNA, 170 bp, Homo sapiens; identical to SEQ ID NO: 458031
  chr3:180320087-180320257
  hyper
  uterine vs. ovary,pancreas_gallbladder,breast,melanoma, bladder_and_urothelial,multiple_myeloma,prostate,liver_bileduct

SEQ ID NO: 482287 - DNA, 98 bp, Homo sapiens; identical to SEQ ID NO: 349870
  chr3:180320294-180320392
  hyper
  uterine vs. ovary,pancreas_gallbladder,breast,melanoma, bladder_and_urothelial,multiple_myeloma,prostate,liver_bileduct

SEQ ID NO: 482288 - DNA, 207 bp, Homo sapiens; identical to SEQ ID NO: 453230
  chr3:180397104-180397311
  hyper
  uterine vs. ovary,lung,breast,sarcoma

SEQ ID NO: 482289 - DNA, 7 bp, Homo sapiens
  chr3:181429601-181429608
  hyper
  uterine vs. cervical,lung
cgccccc

SEQ ID NO: 482290 - DNA, 337 bp, Homo sapiens; identical to SEQ ID NO: 474122
  chr3:181429718-181430055
  hyper
  uterine vs. cervical,lung

SEQ ID NO: 482291 - DNA, 37 bp, Homo sapiens; identical to SEQ ID NO: 462827
  chr3:181430331-181430368
  hyper
  uterine vs. cervical,lung

SEQ ID NO: 482292 - DNA, 146 bp, Homo sapiens; identical to SEQ ID NO: 474124
  chr3:181430443-181430589
  hyper
  uterine vs. cervical,lung

SEQ ID NO: 482293 - DNA, 37 bp, Homo sapiens; identical to SEQ ID NO: 462827
  chr3:181430331-181430368
  hyper
  uterine vs. cervical

SEQ ID NO: 482294 - DNA, 253 bp, Homo sapiens; identical to SEQ ID NO: 462828
  chr3:181430443-181430696
  hyper
  uterine vs. cervical

SEQ ID NO: 482295 - DNA, 3 bp, Homo sapiens
  chr3:186078710-186078713
  hyper
  uterine vs. thyroid
cgt

SEQ ID NO: 482296 - DNA, 133 bp, Homo sapiens; identical to SEQ ID NO: 453234
  chr3:186079331-186079464
  hyper
  uterine vs. thyroid

SEQ ID NO: 482297 - DNA, 46 bp, Homo sapiens; identical to SEQ ID NO: 454388
  chr3:187455297-187455343
  hyper
  uterine vs. renal,multiple_myeloma

SEQ ID NO: 482298 - DNA, 447 bp, Homo sapiens; identical to SEQ ID NO: 454389
  chr3:187456666-187457113
  hyper
  uterine vs. colorectal

SEQ ID NO: 482299 - DNA, 509 bp, Homo sapiens; identical to SEQ ID NO: 345125
  chr3:187457654-187458163
  hyper
  uterine vs. pancreas_gallbladder

SEQ ID NO: 482300 - DNA, 112 bp, Homo sapiens; identical to SEQ ID NO: 455996
  chr3:193775965-193776077
  hyper
  uterine vs. cervical,head_and_neck, bladder_and_urothelial

SEQ ID NO: 482301 - DNA, 104 bp, Homo sapiens
  chr4:1396923-1397027
  hyper
  uterine vs. melanoma
gggcagccccgtgccaggcccggcccccggtcccggtccgcccccgccgccggtcggagcgctggtgtcggcgcccgggttctgcttcttccacttggttcggc

SEQ ID NO: 482302 - DNA, 109 bp, Homo sapiens; identical to SEQ ID NO: 370350
  chr4:1397780-1397889
  hyper
  uterine vs. melanoma

SEQ ID NO: 482303 - DNA, 15 bp, Homo sapiens
  chr4:2765764-2765779
  hyper
  uterine vs. breast,bladder_and_urothelial
cgcggaggaggggct

SEQ ID NO: 482304 - DNA, 133 bp, Homo sapiens
  chr4:4871183-4871316
  hyper
  uterine vs. breast
cggggttcagggagcgggaggagggtctgagagaccccaaagcctcccctttgcgagaccactccttgcttcccccgcctggcgctttccataaccctctgcggcgccctgcctctttgttgccccttagatg

SEQ ID NO: 482305 - DNA, 371 bp, Homo sapiens
  chr4:4871384-4871755
  hyper
  uterine vs. breast
aaagaaaaccccgttccctctctgatgactctcgtggcacccgggtggcagcaggggcttctccaccggagaaacagccacatcgactaaaagggaatgtgtgaggcaggctgagaccttgggtggggccccccacctctcgagttttccaagactcaggttccatctctgttaaatggacacaatcctgacccctggcaggtcctgaaagagtagaagggaaggggttctccacgggctgtaccatcacttgcgtccccagttcggtgatggtggtgaggtcatcacagttgttccgcctgcggtgactgcagctgacatgtatgcgcgcttgcctatggatcacaacccttagaatctaagttttccac

SEQ ID NO: 482306 - DNA, 75 bp, Homo sapiens
  chr4:4871680-4871755
  hyper
  uterine vs. bladder_and_urothelial
cgcctgcggtgactgcagctgacatgtatgcgcgcttgcctatggatcacaacccttagaatctaagttttccac

SEQ ID NO: 482307 - DNA, 243 bp, Homo sapiens
  chr4:4872215-4872458
  hyper
  uterine vs. bladder_and_urothelial
ggagagtgttcttgctcttggaaagtgtcagaaagtgcctgtgcgccactctggacccggaattaagacaccttcacctcttttaatcttctccctatgacgcaggcactcttattaatctgtttcaagtgagaaaaccgaggcacagagagcgtatgtgacttgccaaatgtcacataggtgtctaagacccggcctgtatttcccaccaacctctgccgctgcttctggcatgaatgcaga

SEQ ID NO: 482308 - DNA, 644 bp, Homo sapiens
  chr4:4873528-4874172
  hyper
  uterine vs. anorectal,breast,prostate
aggtgcgtgccagctgtaggagcctgctccgcctgccctcctggaacgcagtcatcctccaggccctgcccgcgcccatttcgcggcccaggaaactgaggtgtggaagcctgtgaagggagggactgctacctatcgattcgtaccggatccagaccctgtgctaaacgctcggcgtgcatggtgccccttaatcctcacaaaagtcgagcgacttagggaggaatattatcccattgcacacacgagcacactgctgcgcagaggcacgaaggtacctgcccagggtctcagctagtcccatttccaacccaggaaggcaagggagcaacccgggaagcaaaatgtaaggagacactttcagggttgtgcaagtgtggggtgggcacccggggagaagggaggagggatgaactatccagagaggaaggcacgcccggccccgacttatcggaataattgtctccattccgcttcggcggtgtctgttgtgtccattgaacagaagcagaacgtgagtccgtatctgcccctcgccaccgccaccagcacctgggatttgactcacacttcaattcctgccctaggaattgatgccagcgcccagtatggccccgcgtggggaatcgagcgccccatccctc

SEQ ID NO: 482309 - DNA, 978 bp, Homo sapiens; identical to SEQ ID NO: 349904
  chr4:4873696-4874674
  hyper
  uterine vs. upper_gi

SEQ ID NO: 482310 - DNA, 105 bp, Homo sapiens; identical to SEQ ID NO: 461073
  chr4:47033907-47034012
  hyper
  uterine vs. ovary

SEQ ID NO: 482311 - DNA, 13 bp, Homo sapiens
  chr4:81951925-81951938
  hyper
  uterine vs. ovary
cgtacactaaaaa

SEQ ID NO: 482312 - DNA, 3 bp, Homo sapiens
  chr4:147559188-147559191
  hyper
  uterine vs. ovary
cgg

SEQ ID NO: 482313 - DNA, 271 bp, Homo sapiens; identical to SEQ ID NO: 459715
  chr4:147560617-147560888
  hyper
  uterine vs. melanoma

SEQ ID NO: 482314 - DNA, 46 bp, Homo sapiens; identical to SEQ ID NO: 459716
  chr4:154143770-154143816
  hyper
  uterine vs. ovary

SEQ ID NO: 482315 - DNA, 214 bp, Homo sapiens; identical to SEQ ID NO: 459717
  chr4:154144184-154144398
  hyper
  uterine vs. ovary

SEQ ID NO: 482316 - DNA, 157 bp, Homo sapiens
  chr4:156680543-156680700
  hyper
  uterine vs. lung
cgggaaggggaggtgcggcggaggcgtggggtcttcccggctctggccggccccaccagtgtgggaggctgagcgccagcggaagggaaggctccgggttcgcgtccccgcgctgcccccgatgcccagcctctcccggagcggtgacaggtgagga

SEQ ID NO: 482317 - DNA, 217 bp, Homo sapiens
  chr4:156680970-156681187
  hyper
  uterine vs. lung
ggtgatccgcaattacggccccgaggtgtgggaagacatcaagtaagtggccggctaccctggctgtggcccaggtcggcgcccagtgtgggaggccccccgcgcctcgcctggtcctcagcctgctggccgggtcgcgggcgcgcatccttggaggtgcctccgcgcctcgctcccggctcgctgcagctgcgctcccacgctccgggactggaac

SEQ ID NO: 482318 - DNA, 156 bp, Homo sapiens; identical to SEQ ID NO: 467382
  chr4:165304258-165304414
  hyper
  uterine vs. melanoma

SEQ ID NO: 482319 - DNA, 678 bp, Homo sapiens
  chr4:169752829-169753507
  hyper
  uterine vs. ovary,colorectal,lung,upper_gi,head_and_neck, breast,pancreas_gallbladder,bladder_and_urothelial,melanoma, renal
cgctgccctggagtcgcgtttattggacactctttagtctgtaaaggaaaaaaacacaaacaccggaggagaatcatcctaacaagccgacaacatatctatgggcctaaaaaacttaaattctttcccgttattagcacttctcgatcgttccaggaaagcccgatttgtagcttggctgccccaggaaggggcctgcgaccagaaagatgcaaagggcgggacaaggttacgagtgggtgcggggaagcctccctaacctgggggccgcgtcccagagctgcgagccacgcctcctctctcccgcccgccgcgccgccggactcttattttgaagggcggcgggtgaaggctcggagcctcctgagtcacccggcgggcgaggtataaagcccgatacctgccccgcgcccggtccgcggagcccgctgcagctcccgctcgctccggacgcggaatcgggcagcagcgggaggcggcccggagagccgaggtaggcgcggggaatcggccctgaggctggtggaagaaatgtgtgaattaaagggagtgcagcgtgcagggtgggccgcgagtcgggagtgcagggctcgggacagggtgggggcggggaggacaagagactcgtcagcgcactttccacccggccggttccttcccgagccctctccctccccc

SEQ ID NO: 482320 - DNA, 84 bp, Homo sapiens
  chr4:169753535-169753619
  hyper
  uterine vs. ovary,colorectal,lung,upper_gi,head_and_neck, breast,pancreas_gallbladder,bladder_and_urothelial,melanoma, renal
cggagctccagataggaatgtctgcatcatcttggcagggcccagacgggagaagatgctctgctgccacggacgatccctccc

SEQ ID NO: 482321 - DNA, 374 bp, Homo sapiens
  chr4:169753133-169753507
  hyper
  uterine vs. upper_gi,bladder_and_urothelial,ovary,breast, pancreas_gallbladder,head_and_neck,anorectal,cervical
cgcccgccgcgccgccggactcttattttgaagggcggcgggtgaaggctcggagcctcctgagtcacccggcgggcgaggtataaagcccgatacctgccccgcgcccggtccgcggagcccgctgcagctcccgctcgctccggacgcggaatcgggcagcagcgggaggcggcccggagagccgaggtaggcgcggggaatcggccctgaggctggtggaagaaatgtgtgaattaaagggagtgcagcgtgcagggtgggccgcgagtcgggagtgcagggctcgggacagggtgggggcggggaggacaagagactcgtcagcgcactttccacccggccggttccttcccgagccctctccctccccc

SEQ ID NO: 482322 - DNA, 440 bp, Homo sapiens
  chr4:169753535-169753975
  hyper
  uterine vs. upper_gi,bladder_and_urothelial,ovary,breast, pancreas_gallbladder,head_and_neck,anorectal,cervical
cggagctccagataggaatgtctgcatcatcttggcagggcccagacgggagaagatgctctgctgccacggacgatccctcccgctctcctaactcttctctgaacacctcgcacccccacggccccccgcccctctcttaatcttggccacgctccctgaggggtcagacctggggtgggagagcagagaaagcggggctggcagagacaggggtgagggccgggagaggcgatgacatcattccctggcagctggcggggagagggtggggacggaggggtccccccgacctgagccgagccctcccttcccaagcccatcctcctttctttgggatggttcaccccacctgggcgccattcaaaggaagtttgcgcgtaactcggggcgtcctttccccggccgggtgctgtgcccggcccgcagtcggtgtttct

SEQ ID NO: 482323 - DNA, 329 bp, Homo sapiens
  chr4:169753646-169753975
  hyper
  uterine vs. ovary
cgcacccccacggccccccgcccctctcttaatcttggccacgctccctgaggggtcagacctggggtgggagagcagagaaagcggggctggcagagacaggggtgagggccgggagaggcgatgacatcattccctggcagctggcggggagagggtggggacggaggggtccccccgacctgagccgagccctcccttcccaagcccatcctcctttctttgggatggttcaccccacctgggcgccattcaaaggaagtttgcgcgtaactcggggcgtcctttccccggccgggtgctgtgcccggcccgcagtcggtgtttct

SEQ ID NO: 482324 - DNA, 273 bp, Homo sapiens; identical to SEQ ID NO: 358013
  chr4:169754143-169754416
  hyper
  uterine vs. ovary

SEQ ID NO: 482325 - DNA, 127 bp, Homo sapiens; identical to SEQ ID NO: 461082
  chr4:174443425-174443552
  hyper
  uterine vs. sarcoma

SEQ ID NO: 482326 - DNA, 71 bp, Homo sapiens; identical to SEQ ID NO: 350015
  chr4:175750738-175750809
  hyper
  uterine vs. lung

SEQ ID NO: 482327 - DNA, 69 bp, Homo sapiens; identical to SEQ ID NO: 453270
  chr4:176922585-176922654
  hyper
  uterine vs. ovary

SEQ ID NO: 482328 - DNA, 43 bp, Homo sapiens; identical to SEQ ID NO: 453271
  chr4:176986744-176986787
  hyper
  uterine vs. ovary,melanoma

SEQ ID NO: 482329 - DNA, 330 bp, Homo sapiens
  chr5:490894-491224
  hyper
  uterine vs. renal
cgcccacgtgacgggcctgccatccatgagcctgtctgtgccctcggcagctttccctgggctgcacctggtgggtgatgctggacggcagggactacagggaggggtgagaaggcgccaaggaaccacgtgctgggtgaggcggccccaacccgggagctcctctttctccatgcgtctccttggtctcaggtttcagccccttgattcccatggagaggccgggccgtgctctctcttgaaccagacggaaaatcgccaattcttgtgagtctggttcagctggtggatttgtttgaggctgagttctcagaccggtgagggcggcag

SEQ ID NO: 482330 - DNA, 2 bp, Homo sapiens
  chr5:524880-524882
  hyper
  uterine vs. ovary,sarcoma
gc

SEQ ID NO: 482331 - DNA, 188 bp, Homo sapiens; identical to SEQ ID NO: 453277
  chr5:22853256-22853444
  hyper
  uterine vs. multiple_myeloma

SEQ ID NO: 482332 - DNA, 11 bp, Homo sapiens
  chr5:22853508-22853519
  hyper
  uterine vs. multiple_myeloma
ccaggattccc

SEQ ID NO: 482333 - DNA, 100 bp, Homo sapiens; identical to SEQ ID NO: 350052
  chr5:22853569-22853669
  hyper
  uterine vs. multiple_myeloma

SEQ ID NO: 482334 - DNA, 22 bp, Homo sapiens
  chr5:40680513-40680535
  hyper
  uterine vs. lymphoid_neoplasm,upper_gi,colorectal, anorectal,multiple_myeloma,pancreas_gallbladder, myeloid_neoplasm,non_cancer,thyroid,cervical, bladder_and_urothelial,renal
cgggtccaggacatctgagggc

SEQ ID NO: 482335 - DNA, 337 bp, Homo sapiens; identical to SEQ ID NO: 456017
  chr5:40680627-40680964
  hyper
  uterine vs. lymphoid_neoplasm,upper_gi,colorectal, anorectal,multiple_myeloma,pancreas_gallbladder, myeloid_neoplasm,non_cancer,thyroid,cervical, bladder_and_urothelial,renal

SEQ ID NO: 482336 - DNA, 89 bp, Homo sapiens; identical to SEQ ID NO: 456018
  chr5:40680875-40680964
  hyper
  uterine vs. myeloid_neoplasm,upper_gi,lymphoid_neoplasm, colorectal,multiple_myeloma,non_cancer,pancreas_gallbladder, thyroid,cervical,bladder_and_urothelial,renal,anorectal, prostate

SEQ ID NO: 482337 - DNA, 99 bp, Homo sapiens; identical to SEQ ID NO: 453281
  chr5:42950747-42950846
  hyper
  uterine vs. sarcoma,non_cancer,myeloid_neoplasm,thyroid, multiple_myeloma,prostate,renal,lymphoid_neoplasm,breast

SEQ ID NO: 482338 - DNA, 175 bp, Homo sapiens; identical to SEQ ID NO: 346682
  chr5:42995428-42995603
  hyper
  uterine vs. lymphoid_neoplasm

SEQ ID NO: 482339 - DNA, 338 bp, Homo sapiens; identical to SEQ ID NO: 456022
  chr5:43007481-43007819
  hyper
  uterine vs. colorectal,cervical,head_and_neck, bladder_and_urothelial,multiple_myeloma

SEQ ID NO: 482340 - DNA, 48 bp, Homo sapiens; identical to SEQ ID NO: 456023
  chr5:43007771-43007819
  hyper
  uterine vs. colorectal,cervical,head_and_neck, bladder_and_urothelial,multiple_myeloma,myeloid_neoplasm, non_cancer,thyroid

SEQ ID NO: 482341 - DNA, 50 bp, Homo sapiens; identical to SEQ ID NO: 345162
  chr5:49737299-49737349
  hyper
  uterine vs. ovary,bladder_and_urothelial,prostate, lymphoid_neoplasm,multiple_myeloma,pancreas_gallbladder,lung, non_cancer,thyroid,myeloid_neoplasm

SEQ ID NO: 482342 - DNA, 76 bp, Homo sapiens; identical to SEQ ID NO: 454408
  chr5:54518558-54518634
  hyper
  uterine vs. myeloid_neoplasm,multiple_myeloma

SEQ ID NO: 482343 - DNA, 210 bp, Homo sapiens; identical to SEQ ID NO: 461096
  chr5:54526958-54527168
  hyper
  uterine vs. cervical,colorectal

SEQ ID NO: 482344 - DNA, 1 bp, Homo sapiens
  chr5:54527844-54527845
  hyper
  uterine vs. cervical,colorectal
c

SEQ ID NO: 482345 - DNA, 38 bp, Homo sapiens; identical to SEQ ID NO: 453283
  chr5:57878673-57878711
  hyper
  uterine vs. ovary

SEQ ID NO: 482346 - DNA, 159 bp, Homo sapiens; identical to SEQ ID NO: 453284
  chr5:57878752-57878911
  hyper
  uterine vs. ovary

SEQ ID NO: 482347 - DNA, 227 bp, Homo sapiens; identical to SEQ ID NO: 345168
  chr5:57879190-57879417
  hyper
  uterine vs. ovary

SEQ ID NO: 482348 - DNA, 489 bp, Homo sapiens; identical to SEQ ID NO: 332371
  chr5:64398796-64399285
  hyper
  uterine vs. lung,upper_gi,cervical, bladder_and_urothelial

SEQ ID NO: 482349 - DNA, 203 bp, Homo sapiens
  chr5:72594568-72594771
  hyper
  uterine vs. anorectal
cgttctctgtgcagcttcaaaaaactcagtaatttcgttagaaaacgttgaaatccgaccccaaagtattcagcccaaatgtttagttaaagtaaccccgtgggttaataaactaaacaaaggcaacccatgcaaaaccggagcaatgaaaaccaggctacataaacgaagggaagtttataagaactctttgggaggaaaaa

SEQ ID NO: 482350 - DNA, 21 bp, Homo sapiens
  chr5:76924480-76924501
  hyper
  uterine vs. myeloid_neoplasm
ccccacgagacccctcccgcc

SEQ ID NO: 482351 - DNA, 81 bp, Homo sapiens; identical to SEQ ID NO: 464605
  chr5:87955380-87955461
  hyper
  uterine vs. myeloid_neoplasm,non_cancer,prostate, multiple_myeloma

SEQ ID NO: 482352 - DNA, 326 bp, Homo sapiens
  chr5:87979367-87979693
  hyper
  uterine vs. prostate,myeloid_neoplasm, bladder_and_urothelial,renal,lung
cgaggctctagctttcccctcctcctttcttgatctcggcaaacaaaaccattctaccacttgagccatctgccgcaggtgtaatggatggcagggggccgacctaaccacactccagtctcttctaggtcgtcaccgctctgcaccaaacaaatgagtcctgtttcaccactagggtgccgaggtggatggtggatgctggcccccgcccctggcagcgctcagcccttagaaaccagagccagctgacaacacgcgaaacacacaggcacagcgaaaacgccgagccgacgctcattccctctgccccctccctctgctctctg

SEQ ID NO: 482353 - DNA, 35 bp, Homo sapiens
  chr5:87979860-87979895
  hyper
  uterine vs. prostate,myeloid_neoplasm,renal, bladder_and_urothelial
cgcgcgcgcacgcgtgaatgtgcatgtgtgtttaa

SEQ ID NO: 482354 - DNA, 158 bp, Homo sapiens
  chr5:87979985-87980143
  hyper
  uterine vs. prostate,myeloid_neoplasm,renal, bladder_and_urothelial
ttttaaagaaaaatggaaaactattaattttctgcgcaagtctagggttcccagtttaggttccagagaacagcagatctgcgcagcccccgccttaccaaactttccttttctagggtttgaaagaggctcacattctcacttcatgacagagcagc

SEQ ID NO: 482355 - DNA, 148 bp, Homo sapiens
  chr5:87980250-87980398
  hyper
  uterine vs. prostate,myeloid_neoplasm,renal, bladder_and_urothelial
aggcacaaggtgcccaggggcaagagcccggggtccaagcttccaggcgcacatcatcctctgggccccgggccctccggctggagcactccctcacccgcatcccatccccgttccattttgatcattatttgaatagcccaggtaa

SEQ ID NO: 482356 - DNA, 138 bp, Homo sapiens; identical to SEQ ID NO: 332428
  chr5:87982673-87982811
  hyper
  uterine vs. multiple_myeloma,prostate, bladder_and_urothelial

SEQ ID NO: 482357 - DNA, 241 bp, Homo sapiens; identical to SEQ ID NO: 370799
  chr5:87983395-87983636
  hyper
  uterine vs. colorectal

SEQ ID NO: 482358 - DNA, 108 bp, Homo sapiens; identical to SEQ ID NO: 332430
  chr5:87984851-87984959
  hyper
  uterine vs. bladder_and_urothelial,breast,head_and_neck, colorectal

SEQ ID NO: 482359 - DNA, 22 bp, Homo sapiens
  chr5:92906252-92906274
  hyper
  uterine vs. thyroid,non_cancer,myeloid_neoplasm, multiple_myeloma
cgccaactgcccgcgcggaacc

SEQ ID NO: 482360 - DNA, 87 bp, Homo sapiens; identical to SEQ ID NO: 453315
  chr5:100238197-100238284
  hyper
  uterine vs. lymphoid_neoplasm,multiple_myeloma,lung, thyroid

SEQ ID NO: 482361 - DNA, 345 bp, Homo sapiens; identical to SEQ ID NO: 453316
  chr5:100239724-100240069
  hyper
  uterine vs. lymphoid_neoplasm,sarcoma,ovary,non_cancer, renal

SEQ ID NO: 482362 - DNA, 17 bp, Homo sapiens
  chr5:112629411-112629428
  hyper
  uterine vs. bladder_and_urothelial,anorectal,sarcoma, renal,head_and_neck,non_cancer,multiple_myeloma,lung,breast, thyroid
cgcttgcctcaaagact

SEQ ID NO: 482363 - DNA, 470 bp, Homo sapiens; identical to SEQ ID NO: 458145
  chr5:112629778-112630248
  hyper
  uterine vs. bladder_and_urothelial,anorectal,sarcoma, renal,head_and_neck,non_cancer,multiple_myeloma,lung,breast, thyroid

SEQ ID NO: 482364 - DNA, 348 bp, Homo sapiens; identical to SEQ ID NO: 458146
  chr5:112629900-112630248
  hyper
  uterine vs. head_and_neck,anorectal,lung, bladder_and_urothelial,breast,renal,sarcoma,multiple_myeloma, pancreas_gallbladder,non_cancer,thyroid,liver_bileduct

SEQ ID NO: 482365 - DNA, 113 bp, Homo sapiens; identical to SEQ ID NO: 345190
  chr5:112630698-112630811
  hyper
  uterine vs. head_and_neck,anorectal,lung, bladder_and_urothelial,breast,renal,sarcoma,multiple_myeloma, pancreas_gallbladder,non_cancer,thyroid,liver_bileduct

SEQ ID NO: 482366 - DNA, 218 bp, Homo sapiens; identical to SEQ ID NO: 454420
  chr5:132082800-132083018
  hyper
  uterine vs. colorectal,upper_gi,thyroid, pancreas_gallbladder

SEQ ID NO: 482367 - DNA, 46 bp, Homo sapiens; identical to SEQ ID NO: 461162
  chr5:134827217-134827263
  hyper
  uterine vs. colorectal,upper_gi,pancreas_gallbladder

SEQ ID NO: 482368 - DNA, 73 bp, Homo sapiens; identical to SEQ ID NO: 345194
  chr5:134880614-134880687
  hyper
  uterine vs. thyroid,myeloid_neoplasm,non_cancer

SEQ ID NO: 482369 - DNA, 625 bp, Homo sapiens; identical to SEQ ID NO: 456042
  chr5:142781875-142782500
  hyper
  uterine vs. anorectal,renal,multiple_myeloma, myeloid_neoplasm,lung,bladder_and_urothelial,non_cancer

SEQ ID NO: 482370 - DNA, 78 bp, Homo sapiens; identical to SEQ ID NO: 456043
  chr5:142782625-142782703
  hyper
  uterine vs. anorectal,renal,multiple_myeloma, myeloid_neoplasm,lung,bladder_and_urothelial,non_cancer

SEQ ID NO: 482371 - DNA, 283 bp, Homo sapiens; identical to SEQ ID NO: 459751
  chr5:142782217-142782500
  hyper
  uterine vs. head_and_neck,lung,ovary,liver_bileduct, pancreas_gallbladder,cervical,melanoma,renal,anorectal, lymphoid_neoplasm,multiple_myeloma,bladder_and_urothelial, breast,non_cancer

SEQ ID NO: 482372 - DNA, 125 bp, Homo sapiens; identical to SEQ ID NO: 459752
  chr5:142782625-142782750
  hyper
  uterine vs. head_and_neck,lung,ovary,liver_bileduct, pancreas_gallbladder,cervical,melanoma,renal,anorectal, lymphoid_neoplasm,multiple_myeloma,bladder_and_urothelial, breast,non_cancer

SEQ ID NO: 482373 - DNA, 410 bp, Homo sapiens; identical to SEQ ID NO: 345197
  chr5:142782794-142783204
  hyper
  uterine vs. head_and_neck,lung,ovary,liver_bileduct, pancreas_gallbladder,cervical,melanoma,renal,anorectal, lymphoid_neoplasm,multiple_myeloma,bladder_and_urothelial, breast,non_cancer

SEQ ID NO: 482374 - DNA, 839 bp, Homo sapiens; identical to SEQ ID NO: 459754
  chr5:142783606-142784445
  hyper
  uterine vs. lung,liver_bileduct,head_and_neck

SEQ ID NO: 482375 - DNA, 718 bp, Homo sapiens; identical to SEQ ID NO: 454427
  chr5:142783958-142784676
  hyper
  uterine vs. ovary,head_and_neck,lung,liver_bileduct, renal,cervical,lymphoid_neoplasm,melanoma,breast,anorectal, sarcoma,multiple_myeloma,pancreas_gallbladder,prostate, non_cancer,thyroid,bladder_and_urothelial

SEQ ID NO: 482376 - DNA, 215 bp, Homo sapiens; identical to SEQ ID NO: 454428
  chr5:142784461-142784676
  hyper
  uterine vs. ovary,head_and_neck,cervical,lung, liver_bileduct,melanoma,breast,lymphoid_neoplasm,prostate, anorectal,sarcoma,renal,multiple_myeloma,pancreas_gallbladder, non_cancer,thyroid,bladder_and_urothelial,myeloid_neoplasm

SEQ ID NO: 482377 - DNA, 32 bp, Homo sapiens; identical to SEQ ID NO: 345199
  chr5:142785272-142785304
  hyper
  uterine vs. ovary,head_and_neck,cervical,lung, liver_bileduct,melanoma,breast,lymphoid_neoplasm,prostate, anorectal,sarcoma,renal,multiple_myeloma,pancreas_gallbladder, non_cancer,thyroid,bladder_and_urothelial,myeloid_neoplasm

SEQ ID NO: 482378 - DNA, 127 bp, Homo sapiens; identical to SEQ ID NO: 467488
  chr5:148520933-148521060
  hyper
  uterine vs. liver_bileduct,pancreas_gallbladder,lung, colorectal,head_and_neck,breast,melanoma,anorectal,sarcoma, renal,upper_gi,bladder_and_urothelial,myeloid_neoplasm,thyroid

SEQ ID NO: 482379 - DNA, 45 bp, Homo sapiens; identical to SEQ ID NO: 346753
  chr5:148521331-148521376
  hyper
  uterine vs. liver_bileduct,pancreas_gallbladder,lung, colorectal,head_and_neck,breast,melanoma,anorectal,sarcoma, renal,upper_gi,bladder_and_urothelial,myeloid_neoplasm,thyroid

SEQ ID NO: 482380 - DNA, 253 bp, Homo sapiens; identical to SEQ ID NO: 467490
  chr5:148650971-148651224
  hyper
  uterine vs. ovary

SEQ ID NO: 482381 - DNA, 98 bp, Homo sapiens; identical to SEQ ID NO: 350197
  chr5:151066500-151066598
  hyper
  uterine vs. sarcoma,melanoma

SEQ ID NO: 482382 - DNA, 240 bp, Homo sapiens; identical to SEQ ID NO: 462923
  chr5:157098032-157098272
  hyper
  uterine vs. ovary,multiple_myeloma

SEQ ID NO: 482383 - DNA, 1 bp, Homo sapiens
  chr5:160973379-160973380
  hyper
  uterine vs. ovary
c

SEQ ID NO: 482384 - DNA, 335 bp, Homo sapiens; identical to SEQ ID NO: 350212
  chr5:160973804-160974139
  hyper
  uterine vs. ovary

SEQ ID NO: 482385 - DNA, 1 bp, Homo sapiens
  chr5:160974514-160974515
  hyper
  uterine vs. ovary
c

SEQ ID NO: 482386 - DNA, 73 bp, Homo sapiens
  chr5:160974540-160974613
  hyper
  uterine vs. ovary
cgttcctgacccgctagtccgggttatttatagcaggaggggaggggggcgaggggagcagaaaggcaatgct

SEQ ID NO: 482387 - DNA, 211 bp, Homo sapiens
  chr5:160974861-160975072
  hyper
  uterine vs. ovary
gcgcactccccacccgccgccatccctccttacctcgcaggcccgcgctcgccgcccactcccgcggcgtgcggagctggcgcccccggcccctcgtccgggacaggggacggggactcccggctgttcaggggctgtacctctggatacaagaagccggagcggtccctagaaggcaggcaaaatgaggaagagcccctcacctccggag

SEQ ID NO: 482388 - DNA, 13 bp, Homo sapiens
  chr5:169063996-169064009
  hyper
  uterine vs. multiple_myeloma,myeloid_neoplasm, lymphoid_neoplasm,bladder_and_urothelial,non_cancer
cggcaatcaggaa

SEQ ID NO: 482389 - DNA, 244 bp, Homo sapiens; identical to SEQ ID NO: 458167
  chr5:170171140-170171384
  hyper
  uterine vs. bladder_and_urothelial

SEQ ID NO: 482390 - DNA, 388 bp, Homo sapiens; identical to SEQ ID NO: 350214
  chr5:170171413-170171801
  hyper
  uterine vs. bladder_and_urothelial

SEQ ID NO: 482391 - DNA, 476 bp, Homo sapiens; identical to SEQ ID NO: 456051
  chr5:174119512-174119988
  hyper
  uterine vs. colorectal

SEQ ID NO: 482392 - DNA, 77 bp, Homo sapiens; identical to SEQ ID NO: 456052
  chr5:174120134-174120211
  hyper
  uterine vs. colorectal

SEQ ID NO: 482393 - DNA, 561 bp, Homo sapiens; identical to SEQ ID NO: 332620
  chr5:180257880-180258441
  hyper
  uterine vs. lung,liver_bileduct,breast,lymphoid_neoplasm, cervical,bladder_and_urothelial,head_and_neck, pancreas_gallbladder,melanoma,anorectal

SEQ ID NO: 482394 - DNA, 457 bp, Homo sapiens; identical to SEQ ID NO: 332621
  chr5:180258503-180258960
  hyper
  uterine vs. head_and_neck,lung,liver_bileduct, lymphoid_neoplasm,pancreas_gallbladder,breast,cervical,melanoma, anorectal,sarcoma,upper_gi,colorectal,multiple_myeloma

SEQ ID NO: 482395 - DNA, 61 bp, Homo sapiens; identical to SEQ ID NO: 453345
  chr6:391113-391174
  hyper
  uterine vs. lymphoid_neoplasm,thyroid,non_cancer, prostate,multiple_myeloma,myeloid_neoplasm

SEQ ID NO: 482396 - DNA, 55 bp, Homo sapiens; identical to SEQ ID NO: 346767
  chr6:393764-393819
  hyper
  uterine vs. lymphoid_neoplasm

SEQ ID NO: 482397 - DNA, 52 bp, Homo sapiens; identical to SEQ ID NO: 459763
  chr6:1625068-1625120
  hyper
  uterine vs. sarcoma

SEQ ID NO: 482398 - DNA, 131 bp, Homo sapiens
  chr6:5851329-5851460
  hyper
  uterine vs. bladder_and_urothelial,thyroid
cgggggacattcctctgctgaccccaaagttcagcaggtgcgggagagggaggggcggactcttctgtctgcacagggcttggggaggcatctcctcctcggggctcgcagacagggcttctcgtgccaac

SEQ ID NO: 482399 - DNA, 76 bp, Homo sapiens; identical to SEQ ID NO: 371032
  chr6:5851836-5851912
  hyper
  uterine vs. bladder_and_urothelial,thyroid

SEQ ID NO: 482400 - DNA, 2 bp, Homo sapiens
  chr6:10417835-10417837
  hyper
  uterine vs. breast
cg

SEQ ID NO: 482401 - DNA, 227 bp, Homo sapiens; identical to SEQ ID NO: 345207
  chr6:10417842-10418069
  hyper
  uterine vs. breast

SEQ ID NO: 482402 - DNA, 138 bp, Homo sapiens; identical to SEQ ID NO: 461191
  chr6:10418940-10419078
  hyper
  uterine vs. breast,anorectal

SEQ ID NO: 482403 - DNA, 126 bp, Homo sapiens; identical to SEQ ID NO: 464676
  chr6:26241269-26241395
  hyper
  uterine vs. non_cancer,multiple_myeloma,sarcoma

SEQ ID NO: 482404 - DNA, 248 bp, Homo sapiens; identical to SEQ ID NO: 453365
  chr6:26577475-26577723
  hyper
  uterine vs. multiple_myeloma,non_cancer

SEQ ID NO: 482405 - DNA, 22 bp, Homo sapiens
  chr6:27064607-27064629
  hyper
  uterine vs. thyroid,non_cancer,multiple_myeloma
cgtgggcttctgaagagaaacc

SEQ ID NO: 482406 - DNA, 72 bp, Homo sapiens; identical to SEQ ID NO: 358480
  chr6:27833292-27833364
  hyper
  uterine vs. cervical

SEQ ID NO: 482407 - DNA, 191 bp, Homo sapiens; identical to SEQ ID NO: 461210
  chr6:28303261-28303452
  hyper
  uterine vs. melanoma,colorectal

SEQ ID NO: 482408 - DNA, 74 bp, Homo sapiens; identical to SEQ ID NO: 461211
  chr6:28303489-28303563
  hyper
  uterine vs. melanoma,colorectal

SEQ ID NO: 482409 - DNA, 209 bp, Homo sapiens; identical to SEQ ID NO: 461212
  chr6:28303607-28303816
  hyper
  uterine vs. melanoma,colorectal

SEQ ID NO: 482410 - DNA, 30 bp, Homo sapiens; identical to SEQ ID NO: 461225
  chr6:50817420-50817450
  hyper
  uterine vs. thyroid

SEQ ID NO: 482411 - DNA, 145 bp, Homo sapiens; identical to SEQ ID NO: 371227
  chr6:71666986-71667131
  hyper
  uterine vs. ovary

SEQ ID NO: 482412 - DNA, 9 bp, Homo sapiens
  chr6:73333099-73333108
  hyper
  uterine vs. head_and_neck,breast,lung,thyroid, lymphoid_neoplasm,multiple_myeloma,prostate,anorectal, non_cancer
ttgtggcgc

SEQ ID NO: 482413 - DNA, 7 bp, Homo sapiens
  chr6:73973121-73973128
  hyper
  uterine vs. ovary
agccagc

SEQ ID NO: 482414 - DNA, 41 bp, Homo sapiens; identical to SEQ ID NO: 454461
  chr6:74019373-74019414
  hyper
  uterine vs. anorectal,lymphoid_neoplasm,lung, multiple_myeloma,myeloid_neoplasm,cervical,prostate,renal, non_cancer,pancreas_gallbladder,head_and_neck

SEQ ID NO: 482415 - DNA, 102 bp, Homo sapiens; identical to SEQ ID NO: 346835
  chr6:74020094-74020196
  hyper
  uterine vs. anorectal,lymphoid_neoplasm,lung, multiple_myeloma,myeloid_neoplasm,cervical,prostate,renal, non_cancer,pancreas_gallbladder,head_and_neck

SEQ ID NO: 482416 - DNA, 706 bp, Homo sapiens; identical to SEQ ID NO: 480993
  chr6:90121688-90122394
  hyper
  uterine vs. ovary

SEQ ID NO: 482417 - DNA, 74 bp, Homo sapiens; identical to SEQ ID NO: 345243
  chr6:90122423-90122497
  hyper
  uterine vs. ovary

SEQ ID NO: 482418 - DNA, 27 bp, Homo sapiens
  chr6:100913285-100913312
  hyper
  uterine vs. myeloid_neoplasm
ggtttggggagttattttctctttctc

SEQ ID NO: 482419 - DNA, 334 bp, Homo sapiens; identical to SEQ ID NO: 454465
  chr6:106959606-106959940
  hyper
  uterine vs. liver_bileduct,pancreas_gallbladder,cervical

SEQ ID NO: 482420 - DNA, 263 bp, Homo sapiens; identical to SEQ ID NO: 454466
  chr6:106960046-106960309
  hyper
  uterine vs. liver_bileduct,pancreas_gallbladder,cervical

SEQ ID NO: 482421 - DNA, 62 bp, Homo sapiens; identical to SEQ ID NO: 454467
  chr6:106959878-106959940
  hyper
  uterine vs. cervical,pancreas_gallbladder,anorectal, lymphoid_neoplasm,colorectal,head_and_neck,upper_gi,prostate, non_cancer,myeloid_neoplasm,thyroid,renal

SEQ ID NO: 482422 - DNA, 263 bp, Homo sapiens; identical to SEQ ID NO: 454466
  chr6:106960046-106960309
  hyper
  uterine vs. cervical,pancreas_gallbladder,anorectal, lymphoid_neoplasm,colorectal,head_and_neck,upper_gi,prostate, non_cancer,myeloid_neoplasm,thyroid,renal

SEQ ID NO: 482423 - DNA, 155 bp, Homo sapiens; identical to SEQ ID NO: 345249
  chr6:106961023-106961178
  hyper
  uterine vs. head_and_neck,lymphoid_neoplasm,colorectal, pancreas_gallbladder,myeloid_neoplasm,prostate,thyroid,cervical, non_cancer,anorectal

SEQ ID NO: 482424 - DNA, 291 bp, Homo sapiens; identical to SEQ ID NO: 350459
  chr6:130088466-130088757
  hyper
  uterine vs. ovary

SEQ ID NO: 482425 - DNA, 47 bp, Homo sapiens; identical to SEQ ID NO: 458230
  chr6:137808706-137808753
  hyper
  uterine vs. multiple_myeloma,non_cancer,thyroid,renal

SEQ ID NO: 482426 - DNA, 259 bp, Homo sapiens; identical to SEQ ID NO: 462987
  chr6:149068930-149069189
  hyper
  uterine vs. head_and_neck,ovary,sarcoma

SEQ ID NO: 482427 - DNA, 5 bp, Homo sapiens
  chr6:149069508-149069513
  hyper
  uterine vs. head_and_neck,ovary,sarcoma
tgtgc

SEQ ID NO: 482428 - DNA, 139 bp, Homo sapiens; identical to SEQ ID NO: 462989
  chr6:149069050-149069189
  hyper
  uterine vs. ovary,bladder_and_urothelial

SEQ ID NO: 482429 - DNA, 224 bp, Homo sapiens; identical to SEQ ID NO: 462990
  chr6:149069508-149069732
  hyper
  uterine vs. ovary,bladder_and_urothelial

SEQ ID NO: 482430 - DNA, 59 bp, Homo sapiens; identical to SEQ ID NO: 350476
  chr6:149069769-149069828
  hyper
  uterine vs. ovary,bladder_and_urothelial

SEQ ID NO: 482431 - DNA, 520 bp, Homo sapiens; identical to SEQ ID NO: 346865
  chr6:158402113-158402633
  hyper
  uterine vs. pancreas_gallbladder,cervical,upper_gi

SEQ ID NO: 482432 - DNA, 341 bp, Homo sapiens; identical to SEQ ID NO: 461241
  chr6:167764611-167764952
  hyper
  uterine vs. lung,breast,bladder_and_urothelial

SEQ ID NO: 482433 - DNA, 23 bp, Homo sapiens
  chr6:167765145-167765168
  hyper
  uterine vs. lung,breast,bladder_and_urothelial
tgcgccttgctctattgtgcctc

SEQ ID NO: 482434 - DNA, 333 bp, Homo sapiens; identical to SEQ ID NO: 332995
  chr7:1001822-1002155
  hyper
  uterine vs. colorectal

SEQ ID NO: 482435 - DNA, 396 bp, Homo sapiens; identical to SEQ ID NO: 453404
  chr7:3082731-3083127
  hyper
  uterine vs. non_cancer,myeloid_neoplasm, pancreas_gallbladder,bladder_and_urothelial,thyroid

SEQ ID NO: 482436 - DNA, 84 bp, Homo sapiens; identical to SEQ ID NO: 350505
  chr7:3083602-3083686
  hyper
  uterine vs. non_cancer,myeloid_neoplasm, pancreas_gallbladder,bladder_and_urothelial,thyroid

SEQ ID NO: 482437 - DNA, 216 bp, Homo sapiens; identical to SEQ ID NO: 475832
  chr7:17339346-17339562
  hyper
  uterine vs. liver_bileduct,upper_gi

SEQ ID NO: 482438 - DNA, 260 bp, Homo sapiens; identical to SEQ ID NO: 350518
  chr7:17339591-17339851
  hyper
  uterine vs. liver_bileduct,upper_gi

SEQ ID NO: 482439 - DNA, 107 bp, Homo sapiens; identical to SEQ ID NO: 346884
  chr7:23287654-23287761
  hyper
  uterine vs. melanoma,sarcoma,cervical

SEQ ID NO: 482440 - DNA, 42 bp, Homo sapiens; identical to SEQ ID NO: 358783
  chr7:23719658-23719700
  hyper
  uterine vs. ovary

SEQ ID NO: 482441 - DNA, 91 bp, Homo sapiens; identical to SEQ ID NO: 456128
  chr7:27135176-27135267
  hyper
  uterine vs. bladder_and_urothelial

SEQ ID NO: 482442 - DNA, 142 bp, Homo sapiens; identical to SEQ ID NO: 345270
  chr7:27136790-27136932
  hyper
  uterine vs. bladder_and_urothelial

SEQ ID NO: 482443 - DNA, 27 bp, Homo sapiens
  chr7:39453515-39453542
  hyper
  uterine vs. sarcoma,ovary,non_cancer,myeloid_neoplasm, multiple_myeloma,renal
cgcttcgggaaaataacgagcccctca

SEQ ID NO: 482444 - DNA, 46 bp, Homo sapiens; identical to SEQ ID NO: 350567
  chr7:39454304-39454350
  hyper
  uterine vs. sarcoma,ovary,non_cancer,myeloid_neoplasm, multiple_myeloma,renal

SEQ ID NO: 482445 - DNA, 168 bp, Homo sapiens; identical to SEQ ID NO: 358843
  chr7:45299683-45299851
  hyper
  uterine vs. melanoma

SEQ ID NO: 482446 - DNA, 132 bp, Homo sapiens
  chr7:79081892-79082024
  hyper
  uterine vs. ovary
cttctcttcccagacccgctggtgatgccgctgcaccctgaagttgctccttccttctttccctcccttcctcccattctttctttcttttcttccttcctcccttccccaaaagctcttcatccgcttcgg

SEQ ID NO: 482447 - DNA, 223 bp, Homo sapiens; identical to SEQ ID NO: 350598
  chr7:79082579-79082802
  hyper
  uterine vs. ovary

SEQ ID NO: 482448 - DNA, 442 bp, Homo sapiens
  chr7:79082579-79083021
  hyper
  uterine vs. ovary
gacactctcatggactttgctagtccagtggcttttctttttcaagcttttggacatggcagtggggcgagtcgcctcagttcctgggctccttggggttaggggggctggtggtgagagaatgaggatggaggagcaagggggcccagggggaagaacagcagactttgccttcgcccccctctattcggtgctttccctcttctttggatggagtgtggacgaggaatggggaggatgagagggacggctgggcagaggtaggagagcttggatgaggttgtgctgtcccttgaatgacactcaaggctgtggccccgcagcagaggaagcagtggtggtggcgtcggcggcggcggcggcggcagccggagcgagcagtagccgagctggtgagcgggtgtggtgggggtggggaaggagggtagggatgccgggggcc

SEQ ID NO: 482449 - DNA, 195 bp, Homo sapiens; identical to SEQ ID NO: 453422
  chr7:79082826-79083021
  hyper
  uterine vs. sarcoma,liver_bileduct

SEQ ID NO: 482450 - DNA, 116 bp, Homo sapiens; identical to SEQ ID NO: 358874
  chr7:79084011-79084127
  hyper
  uterine vs. sarcoma

SEQ ID NO: 482451 - DNA, 473 bp, Homo sapiens; identical to SEQ ID NO: 472590
  chr7:95025593-95026066
  hyper
  uterine vs. liver_bileduct

SEQ ID NO: 482452 - DNA, 80 bp, Homo sapiens; identical to SEQ ID NO: 456135
  chr7:99155672-99155752
  hyper
  uterine vs. lymphoid_neoplasm

SEQ ID NO: 482453 - DNA, 15 bp, Homo sapiens
  chr7:99156600-99156615
  hyper
  uterine vs. lymphoid_neoplasm
ccgccgtcaggagcc

SEQ ID NO: 482454 - DNA, 3 bp, Homo sapiens
  chr7:100318735-100318738
  hyper
  uterine vs. ovary
ccc

SEQ ID NO: 482455 - DNA, 408 bp, Homo sapiens; identical to SEQ ID NO: 467694
  chr7:113726962-113727370
  hyper
  uterine vs. anorectal,head_and_neck

SEQ ID NO: 482456 - DNA, 27 bp, Homo sapiens
  chr7:120970733-120970760
  hyper
  uterine vs. ovary
cgcccttccgaaggagccctggtcccc

SEQ ID NO: 482457 - DNA, 52 bp, Homo sapiens; identical to SEQ ID NO: 464784
  chr7:126891155-126891207
  hyper
  uterine vs. thyroid,ovary,non_cancer,renal, multiple_myeloma,anorectal,cervical,colorectal,prostate

SEQ ID NO: 482458 - DNA, 200 bp, Homo sapiens; identical to SEQ ID NO: 477130
  chr7:149119398-149119598
  hyper
  uterine vs. bladder_and_urothelial

SEQ ID NO: 482459 - DNA, 208 bp, Homo sapiens; identical to SEQ ID NO: 477131
  chr7:149119682-149119890
  hyper
  uterine vs. bladder_and_urothelial

SEQ ID NO: 482460 - DNA, 52 bp, Homo sapiens; identical to SEQ ID NO: 477132
  chr7:149120073-149120125
  hyper
  uterine vs. bladder_and_urothelial

SEQ ID NO: 482461 - DNA, 345 bp, Homo sapiens; identical to SEQ ID NO: 201261
  chr7:156433175-156433520
  hyper
  uterine vs. anorectal,head_and_neck,breast,renal, cervical,non_cancer,thyroid,prostate

SEQ ID NO: 482462 - DNA, 167 bp, Homo sapiens; identical to SEQ ID NO: 454493
  chr7:156433522-156433689
  hyper
  uterine vs. anorectal,head_and_neck,breast,renal, cervical,non_cancer,thyroid,prostate

SEQ ID NO: 482463 - DNA, 312 bp, Homo sapiens; identical to SEQ ID NO: 345291
  chr7:156433208-156433520
  hyper
  uterine vs. ovary,colorectal,pancreas_gallbladder, cervical,anorectal,breast,renal,head_and_neck,lung,prostate, upper_gi,liver_bileduct,non_cancer

SEQ ID NO: 482464 - DNA, 458 bp, Homo sapiens; identical to SEQ ID NO: 454495
  chr7:156433522-156433980
  hyper
  uterine vs. ovary,colorectal,pancreas_gallbladder, cervical,anorectal,breast,renal,head_and_neck,lung,prostate, upper_gi,liver_bileduct,non_cancer

SEQ ID NO: 482465 - DNA, 96 bp, Homo sapiens; identical to SEQ ID NO: 346951
  chr7:156799510-156799606
  hyper
  uterine vs. thyroid

SEQ ID NO: 482466 - DNA, 30 bp, Homo sapiens; identical to SEQ ID NO: 454497
  chr7:157129285-157129315
  hyper
  uterine vs. cervical,anorectal

SEQ ID NO: 482467 - DNA, 398 bp, Homo sapiens; identical to SEQ ID NO: 461285
  chr8:4849835-4850233
  hyper
  uterine vs. ovary

SEQ ID NO: 482468 - DNA, 17 bp, Homo sapiens
  chr8:11058136-11058153
  hyper
  uterine vs. ovary,prostate,lymphoid_neoplasm
cggagaggcgacacagg

SEQ ID NO: 482469 - DNA, 183 bp, Homo sapiens
  chr8:11058799-11058982
  hyper
  uterine vs. ovary,prostate,lymphoid_neoplasm
gctgagcgaagcccacccccacgccaccgccatcggatttcgccgccatcttgactctcttcccagctccggaggttgggggggagggacggcggggggggggggaagaaggcagggaacggggagggggggaaacgaatggagaggaaggggggcggggaggaagcgggggagcaaacgaac

SEQ ID NO: 482470 - DNA, 377 bp, Homo sapiens; identical to SEQ ID NO: 481136
  chr8:11058799-11059176
  hyper
  uterine vs. ovary,prostate,lymphoid_neoplasm, multiple_myeloma,melanoma,non_cancer

SEQ ID NO: 482471 - DNA, 158 bp, Homo sapiens; identical to SEQ ID NO: 350709
  chr8:11059210-11059368
  hyper
  uterine vs. ovary,prostate,lymphoid_neoplasm, multiple_myeloma,melanoma,non_cancer

SEQ ID NO: 482472 - DNA, 5 bp, Homo sapiens
  chr8:16884178-16884183
  hyper
  uterine vs. ovary
cggaa

SEQ ID NO: 482473 - DNA, 85 bp, Homo sapiens; identical to SEQ ID NO: 458295
  chr8:16884239-16884324
  hyper
  uterine vs. ovary

SEQ ID NO: 482474 - DNA, 124 bp, Homo sapiens
  chr8:22960460-22960584
  hyper
  uterine vs. bladder_and_urothelial
cgcgcacgaactcagccaacgatttctgatagatttttgggagtttgaccagagatgcaaggggtgaaggagcgcttcctaccgttagggaactctggggacagagcgccccggccgcctgatg

SEQ ID NO: 482475 - DNA, 20 bp, Homo sapiens
  chr8:23020932-23020952
  hyper
  uterine vs. colorectal
cgaacgaacgaacgaacgaa

SEQ ID NO: 482476 - DNA, 25 bp, Homo sapiens
  chr8:23021107-23021132
  hyper
  uterine vs. colorectal
cggcccggtcgctcctgcccagccc

SEQ ID NO: 482477 - DNA, 127 bp, Homo sapiens; identical to SEQ ID NO: 345299
  chr8:23021590-23021717
  hyper
  uterine vs. colorectal

SEQ ID NO: 482478 - DNA, 2 bp, Homo sapiens
  chr8:24812767-24812769
  hyper
  uterine vs. melanoma
cg

SEQ ID NO: 482479 - DNA, 305 bp, Homo sapiens; identical to SEQ ID NO: 467737
  chr8:24812836-24813141
  hyper
  uterine vs. melanoma

SEQ ID NO: 482480 - DNA, 11 bp, Homo sapiens
  chr8:57069543-57069554
  hyper
  uterine vs. myeloid_neoplasm
cgaaaagtaga

SEQ ID NO: 482481 - DNA, 7 bp, Homo sapiens
  chr8:65488211-65488218
  hyper
  uterine vs. ovary,head_and_neck
cgccaaa

SEQ ID NO: 482482 - DNA, 293 bp, Homo sapiens
  chr8:65488369-65488662
  hyper
  uterine vs. ovary,head_and_neck
gtgaggaccagtatgttttctgtaaaatagatacagacaaggaaaatcttttcgaaagaacgctatacgaacaagtttcaactttcccacagtcgaaatttttggaattgccaagcaacttggaaagactagcaagacggggggcccttggctcactgccaggaatgcgccagctcgcgctagtcccccagcgtcgtcaccctcgctgtcctcctcctcatgagcccacacatgtggacccagtctctctgaagtgagctttgtaggactcggcggcgaaggggacgagaaaa

SEQ ID NO: 482483 - DNA, 8 bp, Homo sapiens
  chr8:65488697-65488705
  hyper
  uterine vs. ovary,head_and_neck
ctggggct

SEQ ID NO: 482484 - DNA, 220 bp, Homo sapiens
  chr8:65489646-65489866
  hyper
  uterine vs. bladder_and_urothelial
cggcctcgataagccaaccagcccagaaccaggggcgctgggctgggtgttcctcggggacggcgcccactgcccgcttggtccctggagtgtcccgagctgcctcccatacccctgctgcggacagagtgggggcagtcctctgcctctgtttcccaactgctttggtaactcagtgactctctgtgaaactgcagagtcagaggacttcccttccgta

SEQ ID NO: 482485 - DNA, 188 bp, Homo sapiens; identical to SEQ ID NO: 359126
  chr8:65490182-65490370
  hyper
  uterine vs. bladder_and_urothelial

SEQ ID NO: 482486 - DNA, 24 bp, Homo sapiens
  chr8:65492354-65492378
  hyper
  uterine vs. anorectal,bladder_and_urothelial,sarcoma, lung,melanoma,ovary,renal,prostate,head_and_neck,thyroid, non_cancer,breast,multiple_myeloma
cggaaagtcccatccccaaatcca

SEQ ID NO: 482487 - DNA, 261 bp, Homo sapiens; identical to SEQ ID NO: 467763
  chr8:65492407-65492668
  hyper
  uterine vs. anorectal,bladder_and_urothelial,sarcoma, lung,melanoma,ovary,renal,prostate,head_and_neck,thyroid, non_cancer,breast,multiple_myeloma

SEQ ID NO: 482488 - DNA, 267 bp, Homo sapiens; identical to SEQ ID NO: 350760
  chr8:65494311-65494578
  hyper
  uterine vs. sarcoma,anorectal,myeloid_neoplasm,lung, thyroid,prostate

SEQ ID NO: 482489 - DNA, 105 bp, Homo sapiens
  chr8:65710834-65710939
  hyper
  uterine vs. lung,sarcoma,melanoma,prostate
cgcgtatgtgtgggaaaaagacagaagaagcctttgttattacaaagtcccaaaggaagccagtaccccgcagcaagttctgactgtctgcactggaaatcatgg

SEQ ID NO: 482490 - DNA, 13 bp, Homo sapiens
  chr8:65711383-65711396
  hyper
  uterine vs. lung,sarcoma,melanoma,prostate
ccgtttccgaccc

SEQ ID NO: 482491 - DNA, 55 bp, Homo sapiens; identical to SEQ ID NO: 346990
  chr8:72756949-72757004
  hyper
  uterine vs. sarcoma,renal,melanoma,non_cancer, myeloid_neoplasm

SEQ ID NO: 482492 - DNA, 195 bp, Homo sapiens; identical to SEQ ID NO: 453471
  chr8:77589904-77590099
  hyper
  uterine vs. melanoma

SEQ ID NO: 482493 - DNA, 244 bp, Homo sapiens; identical to SEQ ID NO: 456176
  chr8:91657148-91657392
  hyper
  uterine vs. liver_bileduct,bladder_and_urothelial

SEQ ID NO: 482494 - DNA, 245 bp, Homo sapiens; identical to SEQ ID NO: 350781
  chr8:91657421-91657666
  hyper
  uterine vs. liver_bileduct,bladder_and_urothelial

SEQ ID NO: 482495 - DNA, 66 bp, Homo sapiens; identical to SEQ ID NO: 456178
  chr8:91996920-91996986
  hyper
  uterine vs. sarcoma,ovary

SEQ ID NO: 482496 - DNA, 2 bp, Homo sapiens
  chr8:98290386-98290388
  hyper
  uterine vs. prostate,myeloid_neoplasm,thyroid,non_cancer, multiple_myeloma,sarcoma,breast
tc

SEQ ID NO: 482497 - DNA, 100 bp, Homo sapiens; identical to SEQ ID NO: 453479
  chr8:110986113-110986213
  hyper
  uterine vs. ovary

SEQ ID NO: 482498 - DNA, 174 bp, Homo sapiens; identical to SEQ ID NO: 350818
  chr8:110987222-110987396
  hyper
  uterine vs. ovary,thyroid

SEQ ID NO: 482499 - DNA, 93 bp, Homo sapiens; identical to SEQ ID NO: 481188
  chr9:214559-214652
  hyper
  uterine vs. bladder_and_urothelial

SEQ ID NO: 482500 - DNA, 169 bp, Homo sapiens; identical to SEQ ID NO: 359262
  chr9:215348-215517
  hyper
  uterine vs. bladder_and_urothelial

SEQ ID NO: 482501 - DNA, 70 bp, Homo sapiens; identical to SEQ ID NO: 359268
  chr9:6412900-6412970
  hyper
  uterine vs. sarcoma,lymphoid_neoplasm

SEQ ID NO: 482502 - DNA, 71 bp, Homo sapiens
  chr9:17905988-17906059
  hyper
  uterine vs. ovary
cgtgcctacccagctgtcgtgggtccccgtcactcccgggcgcatgttgcaaaacaaatcaactccatggg

SEQ ID NO: 482503 - DNA, 37 bp, Homo sapiens; identical to SEQ ID NO: 359282
  chr9:17906726-17906763
  hyper
  uterine vs. ovary

SEQ ID NO: 482504 - DNA, 258 bp, Homo sapiens
  chr9:17906726-17906984
  hyper
  uterine vs. ovary
gcctgccggccgccgccgcggagccaccgcaatcagcgcaggaggcggccacctcttcgagggaggggtctcgcctgagactccccttggtccccgccatggggaccatggcacgactggaggcgccccagtgccccgggttcctggcccgcctcctcggtggcacctggtgcctgctctgtatcgccggacaggtagggtagcctgtgcgtcttgcgtccctcccggggactctgcttctaaagcctgtgctacagc

SEQ ID NO: 482505 - DNA, 135 bp, Homo sapiens; identical to SEQ ID NO: 372079
  chr9:23831484-23831619
  hyper
  uterine vs. melanoma

SEQ ID NO: 482506 - DNA, 41 bp, Homo sapiens; identical to SEQ ID NO: 359305
  chr9:35676180-35676221
  hyper
  uterine vs. multiple_myeloma

SEQ ID NO: 482507 - DNA, 15 bp, Homo sapiens
  chr9:71788936-71788951
  hyper
cgccgcctcccgccc

SEQ ID NO: 482508 - DNA, 45 bp, Homo sapiens; identical to SEQ ID NO: 350872
  chr9:71789757-71789802
  hyper

SEQ ID NO: 482509 - DNA, 102 bp, Homo sapiens; identical to SEQ ID NO: 458342
  chr9:77111662-77111764
  hyper
  uterine vs. ovary

SEQ ID NO: 482510 - DNA, 9 bp, Homo sapiens
  chr9:77112369-77112378
  hyper
  uterine vs. ovary
atccacacc

SEQ ID NO: 482511 - DNA, 167 bp, Homo sapiens
  chr9:82185179-82185346
  hyper
  uterine vs. ovary,anorectal,bladder_and_urothelial, multiple_myeloma,cervical,non_cancer
cgcatagaaataaacgtctaaaacccagcctgttacattagccaacactcttcttgactttttccgaattttttccctgtccccaagattagccgctcgctagaaaagactgcgagcctcagcagcctccccttgaactggggcgctgcctccagctggacacggac

SEQ ID NO: 482512 - DNA, 261 bp, Homo sapiens
  chr9:82185383-82185644
  hyper
  uterine vs. ovary,anorectal,bladder_and_urothelial, multiple_myeloma,cervical,non_cancer
tttcccaggcccctccctaggggtgcccctcctcagccatggctgcccctttctctcctcctccagcatctgcccctggggccacccccacctttccgccatctctcgggcccgcgtggcaccctgctctgtttttaacggggataaacttgacttgcttctccaaagagcgggaaaaagaggcgcagtcttggtactgatctgggggagggaacgtcccagggcgcgcaggggcgttttctacccgtgccccgtcggcct

SEQ ID NO: 482513 - DNA, 469 bp, Homo sapiens; identical to SEQ ID NO: 347033
  chr9:82185703-82186172
  hyper
  uterine vs. ovary,anorectal,bladder_and_urothelial, multiple_myeloma,cervical,non_cancer

SEQ ID NO: 482514 - DNA, 202 bp, Homo sapiens; identical to SEQ ID NO: 453506
  chr9:100610480-100610682
  hyper
  uterine vs. sarcoma

SEQ ID NO: 482515 - DNA, 28 bp, Homo sapiens
  chr9:104248623-104248651
  hyper
  uterine vs. ovary,upper_gi,cervical
gctggtttttcctggtcctgggagggac

SEQ ID NO: 482516 - DNA, 149 bp, Homo sapiens; identical to SEQ ID NO: 456192
  chr9:104248697-104248846
  hyper
  uterine vs. ovary,upper_gi,cervical

SEQ ID NO: 482517 - DNA, 186 bp, Homo sapiens; identical to SEQ ID NO: 347048
  chr9:104248975-104249161
  hyper
  uterine vs. ovary,upper_gi,cervical

SEQ ID NO: 482518 - DNA, 149 bp, Homo sapiens; identical to SEQ ID NO: 456192
  chr9:104248697-104248846
  hyper
  uterine vs. ovary,upper_gi

SEQ ID NO: 482519 - DNA, 500 bp, Homo sapiens
  chr9:104248975-104249475
  hyper
  uterine vs. ovary,upper_gi
ctggggacccctgcggggtcctcgcaatcctccggcaggaagcggtcggagctgcgggcagggccgctaggcaacccgcctgcccgaggcgcactgcccggggcacaggccctctgcgatgactctccccaacccccagctgccctgcttgtgccagctgtggccacccctaatccttgtcccctcgctctagtgtccagggctccgaccaccgcgccagaagggctgggcagatcgtgcgcaacagaaacctacccggttggggcgaccagctcggtcccctgcgcgcgccgagggccgcctctggtattgcccaggctggctagctcatcccggtggaggcgccatctccggggcccggaaggagcgggcgcagcgcggtttgggtgtgcgccggagcctcacctcctcccgcctcgcagctcaggcgcagggctccccttgctcaggcgggccatgtgacccgcgagctgcggagagaccgcggcccccaaagcggc

SEQ ID NO: 482520 - DNA, 25 bp, Homo sapiens
  chr9:116450208-116450233
  hyper
cgcggtgcctcgcgctccggggtac

SEQ ID NO: 482521 - DNA, 7 bp, Homo sapiens
  chr9:131872920-131872927
  hyper
  uterine vs. liver_bileduct
gccagcc

SEQ ID NO: 482522 - DNA, 208 bp, Homo sapiens; identical to SEQ ID NO: 454524
  chr9:135645005-135645213
  hyper
  uterine vs. liver_bileduct

SEQ ID NO: 482523 - DNA, 452 bp, Homo sapiens; identical to SEQ ID NO: 359456
  chr9:135645250-135645702
  hyper
  uterine vs. liver_bileduct

SEQ ID NO: 482524 - DNA, 376 bp, Homo sapiens; identical to SEQ ID NO: 459911
  chr9:140024237-140024613
  hyper
  uterine vs. breast,cervical

SEQ ID NO: 482525 - DNA, 129 bp, Homo sapiens; identical to SEQ ID NO: 467912
  chrX:2846679-2846808
  hyper
  uterine vs. upper_gi

SEQ ID NO: 482526 - DNA, 220 bp, Homo sapiens; identical to SEQ ID NO: 467913
  chrX:2846856-2847076
  hyper
  uterine vs. upper_gi

SEQ ID NO: 482527 - DNA, 314 bp, Homo sapiens; identical to SEQ ID NO: 362110
  chrX:2847196-2847510
  hyper
  uterine vs. upper_gi

SEQ ID NO: 482528 - DNA, 214 bp, Homo sapiens; identical to SEQ ID NO: 458362
  chrX:8699223-8699437
  hyper
  uterine vs. prostate,lung,head_and_neck

SEQ ID NO: 482529 - DNA, 13 bp, Homo sapiens
  chrX:8699750-8699763
  hyper
  uterine vs. prostate,lung,head_and_neck
aggatcagccggc

SEQ ID NO: 482530 - DNA, 87 bp, Homo sapiens; identical to SEQ ID NO: 458364
  chrX:8699350-8699437
  hyper
  uterine vs. bladder_and_urothelial,lung,prostate

SEQ ID NO: 482531 - DNA, 13 bp, Homo sapiens
  chrX:8699750-8699763
  hyper
  uterine vs. bladder_and_urothelial,lung,prostate
aggatcagccggc

SEQ ID NO: 482532 - DNA, 99 bp, Homo sapiens; identical to SEQ ID NO: 458366
  chrX:8699940-8700039
  hyper
  uterine vs. bladder_and_urothelial,lung,prostate

SEQ ID NO: 482533 - DNA, 597 bp, Homo sapiens; identical to SEQ ID NO: 458369
  chrX:9432830-9433427
  hyper
  uterine vs. head_and_neck,upper_gi,prostate,lung

SEQ ID NO: 482534 - DNA, 135 bp, Homo sapiens; identical to SEQ ID NO: 458370
  chrX:9433471-9433606
  hyper
  uterine vs. head_and_neck,upper_gi,prostate,lung

SEQ ID NO: 482535 - DNA, 296 bp, Homo sapiens; identical to SEQ ID NO: 458371
  chrX:9433131-9433427
  hyper
  uterine vs. lung,upper_gi,head_and_neck,prostate

SEQ ID NO: 482536 - DNA, 242 bp, Homo sapiens; identical to SEQ ID NO: 458372
  chrX:9433471-9433713
  hyper
  uterine vs. lung,upper_gi,head_and_neck,prostate

SEQ ID NO: 482537 - DNA, 284 bp, Homo sapiens; identical to SEQ ID NO: 347738
  chrX:9433838-9434122
  hyper
  uterine vs. lung,upper_gi,head_and_neck,prostate

SEQ ID NO: 482538 - DNA, 147 bp, Homo sapiens; identical to SEQ ID NO: 458376
  chrX:9753679-9753826
  hyper
  uterine vs. prostate,lung,head_and_neck

SEQ ID NO: 482539 - DNA, 300 bp, Homo sapiens; identical to SEQ ID NO: 362117
  chrX:9753862-9754162
  hyper
  uterine vs. prostate,lung,head_and_neck

SEQ ID NO: 482540 - DNA, 305 bp, Homo sapiens; identical to SEQ ID NO: 453515
  chrX:13706949-13707254
  hyper
  uterine vs. ovary

SEQ ID NO: 482541 - DNA, 274 bp, Homo sapiens; identical to SEQ ID NO: 453516
  chrX:13707434-13707708
  hyper
  uterine vs. ovary

SEQ ID NO: 482542 - DNA, 25 bp, Homo sapiens
  chrX:13707229-13707254
  hyper
  uterine vs. upper_gi,prostate
cgccccggcccgtcgccatgttgtt

SEQ ID NO: 482543 - DNA, 562 bp, Homo sapiens; identical to SEQ ID NO: 347739
  chrX:13707434-13707996
  hyper
  uterine vs. upper_gi,prostate

SEQ ID NO: 482544 - DNA, 958 bp, Homo sapiens; identical to SEQ ID NO: 336691
  chrX:13752377-13753335
  hyper
  uterine vs. upper_gi

SEQ ID NO: 482545 - DNA, 97 bp, Homo sapiens; identical to SEQ ID NO: 352650
  chrX:14048211-14048308
  hyper
  uterine vs. head_and_neck,lung,upper_gi,prostate, bladder_and_urothelial,sarcoma

SEQ ID NO: 482546 - DNA, 132 bp, Homo sapiens; identical to SEQ ID NO: 453519
  chrX:15511311-15511443
  hyper
  uterine vs. lung,upper_gi,bladder_and_urothelial, prostate,head_and_neck,sarcoma,multiple_myeloma

SEQ ID NO: 482547 - DNA, 140 bp, Homo sapiens; identical to SEQ ID NO: 347741
  chrX:15511544-15511684
  hyper
  uterine vs. lung,upper_gi,bladder_and_urothelial, prostate,head_and_neck,sarcoma,multiple_myeloma

SEQ ID NO: 482548 - DNA, 117 bp, Homo sapiens; identical to SEQ ID NO: 456206
  chrX:15755988-15756105
  hyper
  uterine vs. prostate,upper_gi,bladder_and_urothelial, head_and_neck

SEQ ID NO: 482549 - DNA, 300 bp, Homo sapiens; identical to SEQ ID NO: 352654
  chrX:15756366-15756666
  hyper
  uterine vs. prostate,upper_gi,bladder_and_urothelial, head_and_neck

SEQ ID NO: 482550 - DNA, 52 bp, Homo sapiens; identical to SEQ ID NO: 453521
  chrX:16730628-16730680
  hyper
  uterine vs. prostate,upper_gi,lung,sarcoma,renal, head_and_neck

SEQ ID NO: 482551 - DNA, 225 bp, Homo sapiens; identical to SEQ ID NO: 453522
  chrX:16730628-16730853
  hyper
  uterine vs. head_and_neck,prostate,upper_gi,lung,renal, ovary,bladder_and_urothelial,sarcoma

SEQ ID NO: 482552 - DNA, 35 bp, Homo sapiens; identical to SEQ ID NO: 345669
  chrX:16730902-16730937
  hyper
  uterine vs. head_and_neck,prostate,upper_gi,lung,renal, ovary,bladder_and_urothelial,sarcoma

SEQ ID NO: 482553 - DNA, 4 bp, Homo sapiens
  chrX:16887827-16887831
  hyper
  uterine vs. head_and_neck,prostate,upper_gi,lung
cgcg

SEQ ID NO: 482554 - DNA, 328 bp, Homo sapiens; identical to SEQ ID NO: 453526
  chrX:16888225-16888553
  hyper
  uterine vs. head_and_neck,prostate,upper_gi,lung

SEQ ID NO: 482555 - DNA, 2 bp, Homo sapiens
  chrX:16888664-16888666
  hyper
  uterine vs. head_and_neck,prostate,upper_gi,lung
cc

SEQ ID NO: 482556 - DNA, 187 bp, Homo sapiens; identical to SEQ ID NO: 336699
  chrX:23801086-23801273
  hyper
  uterine vs. upper_gi,prostate,head_and_neck,lung

SEQ ID NO: 482557 - DNA, 363 bp, Homo sapiens
  chrX:39680202-39680565
  hyper
  uterine vs. head_and_neck,prostate,upper_gi, bladder_and_urothelial,lung
cgcacggcttggagcgggcgtataaattaaccgggggccgcagagtgaatacattgcacgcggtatttattatgcggccggacctccgaggggttctccggctcccggacgtggcaaatcttgtccggagcgccgctggccgcgctgccaagggctaggacgagaggacccgtggcggggggcggggggcttctcctccagtcctcgggagccccggggcagcccgcttacagcggcggcagcggggagggtttaggcgaggagagacgcggccccgggcgccgctcgggctaggggccgggcggggagggcggggcggtgggagcgggcggcgcgcccggccccttagcattccgccggcgc

SEQ ID NO: 482558 - DNA, 172 bp, Homo sapiens; identical to SEQ ID NO: 362131
  chrX:39680630-39680802
  hyper
  uterine vs. head_and_neck,prostate,upper_gi, bladder_and_urothelial,lung

SEQ ID NO: 482559 - DNA, 100 bp, Homo sapiens; identical to SEQ ID NO: 458391
  chrX:39871661-39871761
  hyper
  uterine vs. upper_gi

SEQ ID NO: 482560 - DNA, 187 bp, Homo sapiens; identical to SEQ ID NO: 362133
  chrX:39871778-39871965
  hyper
  uterine vs. upper_gi

SEQ ID NO: 482561 - DNA, 510 bp, Homo sapiens; identical to SEQ ID NO: 458393
  chrX:39873113-39873623
  hyper
  uterine vs. upper_gi,prostate,lung, bladder_and_urothelial,head_and_neck

SEQ ID NO: 482562 - DNA, 794 bp, Homo sapiens
  chrX:39873679-39874473
  hyper
  uterine vs. upper_gi,lung,prostate
cgcgcgcgcgcgcgcgctcgagtgccgggagggcagttgcgaaacgggctcttggctgcagcgcggcataatggaggtggctggaacaatgcgcgctttgtgcgcgcggggagttgttttccacccgcctcgccccccttgctcgggccgtatggcactttaatctccgccacgactcggcacaaatgcacttgtgtcctgcgggtcactgggggccgtgcggctggagccgcccccaccccgacccccgcggaacccaccgccggctgccccatcttccttcctgagcaccccccaccaccacctcaattcccggcgtgggccggtgagctggcgtggaagcttccgggcccgccggccacttttattttccgtgaagacggcccctcccccgctccacgagcgcgcgcgcgcacacacacacacacacacacacacacgccgcccgcaggccccacactcaccgccctctctcgcctagcctctcctcggcccgcctccgcccccgcccccgcccccgccccgcgctccggactcctgcgaacaatagtaaatgtcaacagattccgcgcggcgagtgtctgactcggccgagataagggtgcgcggttggccccgcgctcctcgtcgccgcggggggagcccaccctgaccccggctggaaggaaccggctgtgactaaacccgtgccgggagaggggggcgggagggcagggcaccagtcccagctcggtggggcagcctcgccaggagaccaggccctgccccgcccccaccccacttaacccgttgcc

SEQ ID NO: 482563 - DNA, 223 bp, Homo sapiens; identical to SEQ ID NO: 336704
  chrX:39921413-39921636
  hyper
  uterine vs. head_and_neck,upper_gi

SEQ ID NO: 482564 - DNA, 301 bp, Homo sapiens; identical to SEQ ID NO: 336705
  chrX:39922006-39922307
  hyper
  uterine vs. upper_gi

SEQ ID NO: 482565 - DNA, 863 bp, Homo sapiens; identical to SEQ ID NO: 336706
  chrX:39931611-39932474
  hyper
  uterine vs. head_and_neck

SEQ ID NO: 482566 - DNA, 892 bp, Homo sapiens; identical to SEQ ID NO: 336707
  chrX:39933533-39934425
  hyper
  uterine vs. head_and_neck,upper_gi

SEQ ID NO: 482567 - DNA, 654 bp, Homo sapiens; identical to SEQ ID NO: 458395
  chrX:39953710-39954364
  hyper
  uterine vs. prostate,upper_gi,bladder_and_urothelial, head_and_neck,renal,lung

SEQ ID NO: 482568 - DNA, 744 bp, Homo sapiens; identical to SEQ ID NO: 456210
  chrX:39953894-39954638
  hyper
  uterine vs. prostate,upper_gi,head_and_neck, bladder_and_urothelial,renal,lung

SEQ ID NO: 482569 - DNA, 817 bp, Homo sapiens; identical to SEQ ID NO: 458397
  chrX:39954918-39955735
  hyper
  uterine vs. upper_gi,prostate,head_and_neck,lung, bladder_and_urothelial

SEQ ID NO: 482570 - DNA, 973 bp, Homo sapiens; identical to SEQ ID NO: 458398
  chrX:39955257-39956230
  hyper
  uterine vs. prostate,upper_gi,head_and_neck, bladder_and_urothelial,lung

SEQ ID NO: 482571 - DNA, 995 bp, Homo sapiens; identical to SEQ ID NO: 458399
  chrX:39955753-39956748
  hyper
  uterine vs. prostate,upper_gi,lung,head_and_neck, bladder_and_urothelial

SEQ ID NO: 482572 - DNA, 604 bp, Homo sapiens; identical to SEQ ID NO: 458400
  chrX:39956253-39956857
  hyper
  uterine vs. prostate,upper_gi,head_and_neck,lung, bladder_and_urothelial

SEQ ID NO: 482573 - DNA, 211 bp, Homo sapiens; identical to SEQ ID NO: 352662
  chrX:39957026-39957237
  hyper
  uterine vs. prostate,upper_gi,head_and_neck,lung, bladder_and_urothelial

SEQ ID NO: 482574 - DNA, 104 bp, Homo sapiens; identical to SEQ ID NO: 456211
  chrX:39956753-39956857
  hyper
  uterine vs. upper_gi,lung,head_and_neck,prostate

SEQ ID NO: 482575 - DNA, 712 bp, Homo sapiens; identical to SEQ ID NO: 456212
  chrX:39957026-39957738
  hyper
  uterine vs. upper_gi,lung,head_and_neck,prostate

SEQ ID NO: 482576 - DNA, 624 bp, Homo sapiens; identical to SEQ ID NO: 456213
  chrX:39957281-39957905
  hyper
  uterine vs. head_and_neck,upper_gi,prostate,lung

SEQ ID NO: 482577 - DNA, 151 bp, Homo sapiens; identical to SEQ ID NO: 352664
  chrX:39958064-39958215
  hyper
  uterine vs. head_and_neck,upper_gi,prostate,lung

SEQ ID NO: 482578 - DNA, 155 bp, Homo sapiens; identical to SEQ ID NO: 456215
  chrX:39957750-39957905
  hyper
  uterine vs. upper_gi,prostate,lung,head_and_neck

SEQ ID NO: 482579 - DNA, 514 bp, Homo sapiens; identical to SEQ ID NO: 362143
  chrX:39958064-39958578
  hyper
  uterine vs. upper_gi,prostate,lung,head_and_neck

SEQ ID NO: 482580 - DNA, 634 bp, Homo sapiens; identical to SEQ ID NO: 458408
  chrX:39963967-39964601
  hyper
  uterine vs. head_and_neck,prostate,upper_gi,lung, bladder_and_urothelial

SEQ ID NO: 482581 - DNA, 285 bp, Homo sapiens; identical to SEQ ID NO: 347745
  chrX:39964630-39964915
  hyper
  uterine vs. head_and_neck,prostate,upper_gi,lung, bladder_and_urothelial

SEQ ID NO: 482582 - DNA, 907 bp, Homo sapiens; identical to SEQ ID NO: 458410
  chrX:39965255-39966162
  hyper
  uterine vs. lung,upper_gi,prostate,head_and_neck,renal, liver_bileduct,bladder_and_urothelial

SEQ ID NO: 482583 - DNA, 906 bp, Homo sapiens; identical to SEQ ID NO: 458411
  chrX:39965666-39966572
  hyper
  uterine vs. lung,upper_gi

SEQ ID NO: 482584 - DNA, 622 bp, Homo sapiens; identical to SEQ ID NO: 458412
  chrX:39968299-39968921
  hyper
  uterine vs. upper_gi,head_and_neck,prostate,lung

SEQ ID NO: 482585 - DNA, 247 bp, Homo sapiens; identical to SEQ ID NO: 345671
  chrX:39968950-39969197
  hyper
  uterine vs. upper_gi,head_and_neck,prostate,lung

SEQ ID NO: 482586 - DNA, 811 bp, Homo sapiens; identical to SEQ ID NO: 453528
  chrX:40012149-40012960
  hyper
  uterine vs. lung,upper_gi,prostate,head_and_neck

SEQ ID NO: 482587 - DNA, 983 bp, Homo sapiens; identical to SEQ ID NO: 352670
  chrX:40012483-40013466
  hyper
  uterine vs. upper_gi,lung,prostate, bladder_and_urothelial,head_and_neck,liver_bileduct,renal

SEQ ID NO: 482588 - DNA, 939 bp, Homo sapiens; identical to SEQ ID NO: 458416
  chrX:40012993-40013932
  hyper
  uterine vs. upper_gi,prostate,lung,head_and_neck

SEQ ID NO: 482589 - DNA, 990 bp, Homo sapiens; identical to SEQ ID NO: 347749
  chrX:40013475-40014465
  hyper
  uterine vs. prostate,upper_gi,bladder_and_urothelial, lung,head_and_neck,liver_bileduct

SEQ ID NO: 482590 - DNA, 544 bp, Homo sapiens; identical to SEQ ID NO: 458418
  chrX:40013994-40014538
  hyper
  uterine vs. head_and_neck,upper_gi,lung,prostate

SEQ ID NO: 482591 - DNA, 298 bp, Homo sapiens; identical to SEQ ID NO: 458419
  chrX:40014669-40014967
  hyper
  uterine vs. head_and_neck,upper_gi,lung,prostate

SEQ ID NO: 482592 - DNA, 145 bp, Homo sapiens; identical to SEQ ID NO: 458420
  chrX:40017447-40017592
  hyper
  uterine vs. prostate,upper_gi,lung,head_and_neck, bladder_and_urothelial

SEQ ID NO: 482593 - DNA, 32 bp, Homo sapiens; identical to SEQ ID NO: 352674
  chrX:40017968-40018000
  hyper
  uterine vs. prostate,upper_gi,lung,head_and_neck, bladder_and_urothelial

SEQ ID NO: 482594 - DNA, 227 bp, Homo sapiens
  chrX:40030835-40031062
  hyper
  uterine vs. prostate,upper_gi,head_and_neck
cggatggaaaccgaggcacgcagccctcgaccccggccaggcgtggagtaggggagcagggggtgccccgcgtgggcgcaccctaagaaaccagtgcggacatggcgagcgagaccagagcgcagttgtgtgtggtttttccccaggtttttattcttccagccctgtggaaaggaggagagccgcaacccggagagggagccggaaagaaacacttaatcaccggc

SEQ ID NO: 482595 - DNA, 216 bp, Homo sapiens
  chrX:40031175-40031391
  hyper
  uterine vs. prostate,upper_gi,head_and_neck
cggcggccggctccggctcacagagcctctctcaacgccggcaagtgcagccgggccgcccagcccccaggccagcctggccccctctgggcctggggttggcgagggcagctgggcgtctgcgctgcccagcccagccgcggatccatggggtttcgcgagctgaaagtaaaggcttgagggagtggggacacccacaccgacccgcggcacgca

SEQ ID NO: 482596 - DNA, 273 bp, Homo sapiens
  chrX:40031434-40031707
  hyper
  uterine vs. prostate,upper_gi,head_and_neck
actactagcggtggccggaggctcagccaccttcgcgggagaggggatttaccgccaccctcatccacgcgcaggccccaccgcccggtcctctcctctgatccccgggccattgcgaaacacggagcgaacaggtcctcgccagcagccgtcatttcccgggaagatgggaacccacaagcctgactgtgcttcctaaggatactagcgtgcgcgcagaccttggggggaaagagggcagcgcggtctccccgacccggactcttccctggc

SEQ ID NO: 482597 - DNA, 165 bp, Homo sapiens
  chrX:40031226-40031391
  hyper
  uterine vs. prostate,upper_gi,head_and_neck,lung
cgggccgcccagcccccaggccagcctggccccctctgggcctggggttggcgagggcagctgggcgtctgcgctgcccagcccagccgcggatccatggggtttcgcgagctgaaagtaaaggcttgagggagtggggacacccacaccgacccgcggcacgca

SEQ ID NO: 482598 - DNA, 662 bp, Homo sapiens; identical to SEQ ID NO: 352677
  chrX:40031434-40032096
  hyper
  uterine vs. prostate,upper_gi,head_and_neck,lung

SEQ ID NO: 482599 - DNA, 187 bp, Homo sapiens; identical to SEQ ID NO: 456217
  chrX:40034239-40034426
  hyper
  uterine vs. prostate,head_and_neck,upper_gi, bladder_and_urothelial,lung,renal

SEQ ID NO: 482600 - DNA, 90 bp, Homo sapiens; identical to SEQ ID NO: 456218
  chrX:40035057-40035147
  hyper
  uterine vs. prostate,head_and_neck,upper_gi, bladder_and_urothelial,lung,renal

SEQ ID NO: 482601 - DNA, 599 bp, Homo sapiens; identical to SEQ ID NO: 456219
  chrX:40035057-40035656
  hyper
  uterine vs. prostate,upper_gi,head_and_neck, bladder_and_urothelial,lung,renal

SEQ ID NO: 482602 - DNA, 564 bp, Homo sapiens; identical to SEQ ID NO: 456220
  chrX:40035161-40035725
  hyper
  uterine vs. upper_gi,prostate,head_and_neck,lung,renal, bladder_and_urothelial

SEQ ID NO: 482603 - DNA, 282 bp, Homo sapiens; identical to SEQ ID NO: 456221
  chrX:40035852-40036134
  hyper
  uterine vs. upper_gi,prostate,head_and_neck,lung,renal, bladder_and_urothelial

SEQ ID NO: 482604 - DNA, 60 bp, Homo sapiens; identical to SEQ ID NO: 456222
  chrX:40035665-40035725
  hyper
  uterine vs. upper_gi,prostate,head_and_neck,lung,renal, bladder_and_urothelial

SEQ ID NO: 482605 - DNA, 721 bp, Homo sapiens; identical to SEQ ID NO: 347751
  chrX:40035852-40036573
  hyper
  uterine vs. upper_gi,prostate,head_and_neck,lung,renal, bladder_and_urothelial

SEQ ID NO: 482606 - DNA, 61 bp, Homo sapiens; identical to SEQ ID NO: 453529
  chrX:40126403-40126464
  hyper
  uterine vs. upper_gi,prostate,head_and_neck

SEQ ID NO: 482607 - DNA, 205 bp, Homo sapiens; identical to SEQ ID NO: 336720
  chrX:40506434-40506639
  hyper
  uterine vs. head_and_neck,upper_gi

SEQ ID NO: 482608 - DNA, 76 bp, Homo sapiens; identical to SEQ ID NO: 456224
  chrX:68758240-68758316
  hyper
  uterine vs. prostate,bladder_and_urothelial,upper_gi, renal

SEQ ID NO: 482609 - DNA, 563 bp, Homo sapiens; identical to SEQ ID NO: 453533
  chrX:71525281-71525844
  hyper
  uterine vs. upper_gi,prostate,lung,head_and_neck

SEQ ID NO: 482610 - DNA, 181 bp, Homo sapiens; identical to SEQ ID NO: 453534
  chrX:71525998-71526179
  hyper
  uterine vs. upper_gi,prostate,lung,head_and_neck

SEQ ID NO: 482611 - DNA, 104 bp, Homo sapiens
  chrX:71525740-71525844
  hyper
  uterine vs. lung,prostate,head_and_neck,upper_gi
cggtgctctgcgaagcagggactcggcgcgcggctcgccagcccgcgtttatagggagaggggtgtgcgcgtgggtgtgtgtgtgtgggcgtgtgtcgggggag

SEQ ID NO: 482612 - DNA, 711 bp, Homo sapiens; identical to SEQ ID NO: 352685
  chrX:71525998-71526709
  hyper
  uterine vs. lung,prostate,head_and_neck,upper_gi

SEQ ID NO: 482613 - DNA, 654 bp, Homo sapiens; identical to SEQ ID NO: 458432
  chrX:71526230-71526884
  hyper
  uterine vs. head_and_neck,prostate, bladder_and_urothelial,upper_gi,lung

SEQ ID NO: 482614 - DNA, 249 bp, Homo sapiens; identical to SEQ ID NO: 362169
  chrX:71526917-71527166
  hyper
  uterine vs. head_and_neck,prostate, bladder_and_urothelial,upper_gi,lung

SEQ ID NO: 482615 - DNA, 245 bp, Homo sapiens; identical to SEQ ID NO: 458434
  chrX:95940048-95940293
  hyper
  uterine vs. prostate,upper_gi,lung, bladder_and_urothelial,liver_bileduct

SEQ ID NO: 482616 - DNA, 393 bp, Homo sapiens; identical to SEQ ID NO: 336727
  chrX:102862914-102863307
  hyper
  uterine vs. head_and_neck,upper_gi,prostate,lung, bladder_and_urothelial

SEQ ID NO: 482617 - DNA, 84 bp, Homo sapiens; identical to SEQ ID NO: 458436
  chrX:110924337-110924421
  hyper
  uterine vs. bladder_and_urothelial,prostate,lung, upper_gi,head_and_neck

SEQ ID NO: 482618 - DNA, 157 bp, Homo sapiens; identical to SEQ ID NO: 352689
  chrX:110924466-110924623
  hyper
  uterine vs. bladder_and_urothelial,prostate,lung, upper_gi,head_and_neck

SEQ ID NO: 482619 - DNA, 85 bp, Homo sapiens; identical to SEQ ID NO: 458438
  chrX:123094093-123094178
  hyper
  uterine vs. lung,upper_gi,head_and_neck,prostate

SEQ ID NO: 482620 - DNA, 87 bp, Homo sapiens; identical to SEQ ID NO: 362175
  chrX:123094335-123094422
  hyper
  uterine vs. lung,upper_gi,head_and_neck,prostate

SEQ ID NO: 482621 - DNA, 198 bp, Homo sapiens; identical to SEQ ID NO: 336730
  chrX:123094505-123094703
  hyper
  uterine vs. lung,upper_gi,head_and_neck,liver_bileduct, bladder_and_urothelial,prostate

SEQ ID NO: 482622 - DNA, 856 bp, Homo sapiens; identical to SEQ ID NO: 336731
  chrX:129146935-129147791
  hyper
  uterine vs. upper_gi,bladder_and_urothelial, head_and_neck,prostate,lung

SEQ ID NO: 482623 - DNA, 116 bp, Homo sapiens; identical to SEQ ID NO: 336732
  chrX:129171389-129171505
  hyper
  uterine vs. upper_gi

SEQ ID NO: 482624 - DNA, 158 bp, Homo sapiens; identical to SEQ ID NO: 375448
  chrX:133507338-133507496
  hyper
  uterine vs. upper_gi

SEQ ID NO: 482625 - DNA, 48 bp, Homo sapiens; identical to SEQ ID NO: 461368
  chr1:2331316-2331364
  hypo
  uterine vs. melanoma,lung,upper_gi,sarcoma, liver_bileduct,colorectal,lymphoid_neoplasm,anorectal, pancreas_gallbladder,cervical,bladder_and_urothelial,prostate, multiple_myeloma

SEQ ID NO: 482626 - DNA, 183 bp, Homo sapiens; identical to SEQ ID NO: 345687
  chr1:2331437-2331620
  hypo
  uterine vs. melanoma,lung,upper_gi,sarcoma, liver_bileduct,colorectal,lymphoid_neoplasm,anorectal, pancreas_gallbladder,cervical,bladder_and_urothelial,prostate, multiple_myeloma

SEQ ID NO: 482627 - DNA, 205 bp, Homo sapiens; identical to SEQ ID NO: 362242
  chr1:2377210-2377415
  hypo
  uterine vs. head_and_neck

SEQ ID NO: 482628 - DNA, 57 bp, Homo sapiens; identical to SEQ ID NO: 472629
  chr1:6391374-6391431
  hypo
  uterine vs. liver_bileduct,head_and_neck

SEQ ID NO: 482629 - DNA, 94 bp, Homo sapiens; identical to SEQ ID NO: 362317
  chr1:6391541-6391635
  hypo
  uterine vs. liver_bileduct,head_and_neck

SEQ ID NO: 482630 - DNA, 107 bp, Homo sapiens; identical to SEQ ID NO: 472631
  chr1:6713808-6713915
  hypo
  uterine vs. head_and_neck,colorectal,upper_gi,anorectal, bladder_and_urothelial,lung,pancreas_gallbladder,liver_bileduct, lymphoid_neoplasm,breast,cervical,prostate

SEQ ID NO: 482631 - DNA, 308 bp, Homo sapiens; identical to SEQ ID NO: 472632
  chr1:6714041-6714349
  hypo
  uterine vs. head_and_neck,colorectal,upper_gi,anorectal, bladder_and_urothelial,lung,pancreas_gallbladder,liver_bileduct, lymphoid_neoplasm,breast,cervical,prostate

SEQ ID NO: 482632 - DNA, 367 bp, Homo sapiens; identical to SEQ ID NO: 336905
  chr1:10495109-10495476
  hypo
  uterine vs. melanoma,breast,pancreas_gallbladder, head_and_neck,upper_gi,liver_bileduct,anorectal,colorectal, lymphoid_neoplasm,prostate,renal

SEQ ID NO: 482633 - DNA, 517 bp, Homo sapiens; identical to SEQ ID NO: 455503
  chr1:12226892-12227409
  hypo
  uterine vs. ovary

SEQ ID NO: 482634 - DNA, 207 bp, Homo sapiens; identical to SEQ ID NO: 455504
  chr1:12227438-12227645
  hypo
  uterine vs. ovary

SEQ ID NO: 482635 - DNA, 247 bp, Homo sapiens; identical to SEQ ID NO: 455505
  chr1:12227162-12227409
  hypo
  uterine vs. ovary,colorectal

SEQ ID NO: 482636 - DNA, 207 bp, Homo sapiens; identical to SEQ ID NO: 455504
  chr1:12227438-12227645
  hypo
  uterine vs. ovary,colorectal

SEQ ID NO: 482637 - DNA, 93 bp, Homo sapiens; identical to SEQ ID NO: 347792
  chr1:12251958-12252051
  hypo
  uterine vs. cervical,melanoma

SEQ ID NO: 482638 - DNA, 153 bp, Homo sapiens; identical to SEQ ID NO: 472638
  chr1:12460147-12460300
  hypo
  uterine vs. upper_gi,liver_bileduct, bladder_and_urothelial,pancreas_gallbladder,sarcoma,colorectal, breast,prostate,melanoma,head_and_neck

SEQ ID NO: 482639 - DNA, 121 bp, Homo sapiens; identical to SEQ ID NO: 336936
  chr1:14114676-14114797
  hypo
  uterine vs. upper_gi,breast,bladder_and_urothelial, liver_bileduct

SEQ ID NO: 482640 - DNA, 77 bp, Homo sapiens; identical to SEQ ID NO: 454554
  chr1:14125492-14125569
  hypo
  uterine vs. lymphoid_neoplasm

SEQ ID NO: 482641 - DNA, 54 bp, Homo sapiens; identical to SEQ ID NO: 352807
  chr1:14125622-14125676
  hypo
  uterine vs. lymphoid_neoplasm

SEQ ID NO: 482642 - DNA, 205 bp, Homo sapiens; identical to SEQ ID NO: 457247
  chr1:18434105-18434310
  hypo
  uterine vs. melanoma

SEQ ID NO: 482643 - DNA, 37 bp, Homo sapiens; identical to SEQ ID NO: 349182
  chr1:18434816-18434853
  hypo
  uterine vs. melanoma

SEQ ID NO: 482644 - DNA, 103 bp, Homo sapiens; identical to SEQ ID NO: 472639
  chr1:25919205-25919308
  hypo
  uterine vs. cervical,pancreas_gallbladder

SEQ ID NO: 482645 - DNA, 120 bp, Homo sapiens; identical to SEQ ID NO: 362405
  chr1:25919337-25919457
  hypo
  uterine vs. cervical,pancreas_gallbladder

SEQ ID NO: 482646 - DNA, 62 bp, Homo sapiens; identical to SEQ ID NO: 337008
  chr1:33016544-33016606
  hypo
  uterine vs. pancreas_gallbladder,upper_gi

SEQ ID NO: 482647 - DNA, 141 bp, Homo sapiens; identical to SEQ ID NO: 459936
  chr1:44717932-44718073
  hypo
  uterine vs. liver_bileduct

SEQ ID NO: 482648 - DNA, 138 bp, Homo sapiens; identical to SEQ ID NO: 352856
  chr1:44718164-44718302
  hypo
  uterine vs. liver_bileduct

SEQ ID NO: 482649 - DNA, 361 bp, Homo sapiens; identical to SEQ ID NO: 337050
  chr1:44971165-44971526
  hypo
  uterine vs. head_and_neck,pancreas_gallbladder,breast

SEQ ID NO: 482650 - DNA, 93 bp, Homo sapiens; identical to SEQ ID NO: 337056
  chr1:46111798-46111891
  hypo
  uterine vs. liver_bileduct

SEQ ID NO: 482651 - DNA, 42 bp, Homo sapiens
  chr1:46921731-46921773
  hypo
  uterine vs. anorectal
cgcagccaggcccccgagtgtgcgccgtgtaaagtgacacat

SEQ ID NO: 482652 - DNA, 209 bp, Homo sapiens; identical to SEQ ID NO: 337062
  chr1:46963465-46963674
  hypo
  uterine vs. breast,lymphoid_neoplasm,sarcoma, bladder_and_urothelial,anorectal,colorectal,prostate,renal,lung

SEQ ID NO: 482653 - DNA, 233 bp, Homo sapiens
  chr1:47041011-47041244
  hypo
  uterine vs. head_and_neck,anorectal,renal, lymphoid_neoplasm,cervical,bladder_and_urothelial, liver_bileduct
cgactggaagcaattgcggctaataacactgaatactaggtgtgtgtcctggaggcaagcagcaaataattacttgccctccctcttgcccataaatcacggggcagtatttacattgcctggagaaaatggaaacatctgtcaaatggacttggggcctaacatgggcaccgctagaccctaactgctaagcgctgcttaatgaaacggccgcgttcctggccactgtagca

SEQ ID NO: 482654 - DNA, 37 bp, Homo sapiens; identical to SEQ ID NO: 352864
  chr1:47041273-47041310
  hypo
  uterine vs. head_and_neck,anorectal,renal, lymphoid_neoplasm,cervical,bladder_and_urothelial, liver_bileduct

SEQ ID NO: 482655 - DNA, 391 bp, Homo sapiens; identical to SEQ ID NO: 337097
  chr1:61913163-61913554
  hypo
  uterine vs. breast,bladder_and_urothelial,lung, head_and_neck,upper_gi,liver_bileduct,prostate

SEQ ID NO: 482656 - DNA, 77 bp, Homo sapiens; identical to SEQ ID NO: 337109
  chr1:86277780-86277857
  hypo

SEQ ID NO: 482657 - DNA, 438 bp, Homo sapiens; identical to SEQ ID NO: 464043
  chr1:90308855-90309293
  hypo
  uterine vs. cervical,melanoma,anorectal,multiple_myeloma, colorectal,sarcoma,pancreas_gallbladder,lymphoid_neoplasm, head_and_neck,upper_gi,bladder_and_urothelial,myeloid_neoplasm, non_cancer,breast,renal,thyroid,liver_bileduct

SEQ ID NO: 482658 - DNA, 113 bp, Homo sapiens; identical to SEQ ID NO: 349296
  chr1:109204221-109204334
  hypo
  uterine vs. cervical,multiple_myeloma,upper_gi, bladder_and_urothelial,non_cancer,breast,colorectal,prostate

SEQ ID NO: 482659 - DNA, 365 bp, Homo sapiens; identical to SEQ ID NO: 459281
  chr1:110753530-110753895
  hypo
  uterine vs. ovary

SEQ ID NO: 482660 - DNA, 47 bp, Homo sapiens; identical to SEQ ID NO: 459282
  chr1:110753957-110754004
  hypo
  uterine vs. ovary

SEQ ID NO: 482661 - DNA, 16 bp, Homo sapiens
  chr1:110754101-110754117
  hypo
  uterine vs. ovary
ggagccccgcagcgct

SEQ ID NO: 482662 - DNA, 118 bp, Homo sapiens; identical to SEQ ID NO: 337151
  chr1:116219361-116219479
  hypo
  uterine vs. liver_bileduct

SEQ ID NO: 482663 - DNA, 287 bp, Homo sapiens; identical to SEQ ID NO: 337204
  chr1:160953524-160953811
  hypo
  uterine vs. liver_bileduct,upper_gi,pancreas_gallbladder

SEQ ID NO: 482664 - DNA, 181 bp, Homo sapiens; identical to SEQ ID NO: 337233
  chr1:171570080-171570261
  hypo
  uterine vs. liver_bileduct,lung,upper_gi,colorectal

SEQ ID NO: 482665 - DNA, 426 bp, Homo sapiens; identical to SEQ ID NO: 362588
  chr1:172357766-172358192
  hypo
  uterine vs. head_and_neck,colorectal,cervical,upper_gi, melanoma,lung

SEQ ID NO: 482666 - DNA, 153 bp, Homo sapiens; identical to SEQ ID NO: 454589
  chr1:175375048-175375201
  hypo
  uterine vs. anorectal

SEQ ID NO: 482667 - DNA, 131 bp, Homo sapiens; identical to SEQ ID NO: 362603
  chr1:180235795-180235926
  hypo
  uterine vs. cervical

SEQ ID NO: 482668 - DNA, 192 bp, Homo sapiens; identical to SEQ ID NO: 337254
  chr1:180945775-180945967
  hypo
  uterine vs. head_and_neck

SEQ ID NO: 482669 - DNA, 388 bp, Homo sapiens; identical to SEQ ID NO: 337262
  chr1:193149436-193149824
  hypo
  uterine vs. cervical,head_and_neck,breast,melanoma

SEQ ID NO: 482670 - DNA, 368 bp, Homo sapiens; identical to SEQ ID NO: 337293
  chr1:205038784-205039152
  hypo
  uterine vs. cervical,melanoma,lymphoid_neoplasm,renal, pancreas_gallbladder,breast,thyroid

SEQ ID NO: 482671 - DNA, 92 bp, Homo sapiens; identical to SEQ ID NO: 337304
  chr1:207240948-207241040
  hypo
  uterine vs. lung,head_and_neck

SEQ ID NO: 482672 - DNA, 55 bp, Homo sapiens; identical to SEQ ID NO: 344990
  chr1:219347516-219347571
  hypo
  uterine vs. breast,upper_gi,renal,lymphoid_neoplasm, multiple_myeloma,melanoma,pancreas_gallbladder, bladder_and_urothelial,liver_bileduct,myeloid_neoplasm,prostate, thyroid,colorectal,lung,head_and_neck,sarcoma,cervical,
  CONT. FROM ABOVE: non_cancer

SEQ ID NO: 482673 - DNA, 262 bp, Homo sapiens; identical to SEQ ID NO: 337367
  chr1:230266303-230266565
  hypo
  uterine vs. liver_bileduct,breast,pancreas_gallbladder

SEQ ID NO: 482674 - DNA, 175 bp, Homo sapiens; identical to SEQ ID NO: 337383
  chr1:233085208-233085383
  hypo
  uterine vs. bladder_and_urothelial,lung,upper_gi, pancreas_gallbladder,renal,liver_bileduct,melanoma,colorectal

SEQ ID NO: 482675 - DNA, 694 bp, Homo sapiens; identical to SEQ ID NO: 331162
  chr1:236444211-236444905
  hypo
  uterine vs. head_and_neck

SEQ ID NO: 482676 - DNA, 4 bp, Homo sapiens
  chr1:237205156-237205160
  hypo
  uterine vs. sarcoma
cgtg

SEQ ID NO: 482677 - DNA, 37 bp, Homo sapiens; identical to SEQ ID NO: 466027
  chr1:237205188-237205225
  hypo
  uterine vs. sarcoma

SEQ ID NO: 482678 - DNA, 169 bp, Homo sapiens; identical to SEQ ID NO: 481808
  chr1:244080795-244080964
  hypo
  uterine vs. ovary

SEQ ID NO: 482679 - DNA, 105 bp, Homo sapiens; identical to SEQ ID NO: 337431
  chr1:246160284-246160389
  hypo
  uterine vs. liver_bileduct,bladder_and_urothelial, upper_gi,melanoma,pancreas_gallbladder

SEQ ID NO: 482680 - DNA, 216 bp, Homo sapiens; identical to SEQ ID NO: 376147
  chr1:246310269-246310485
  hypo
  uterine vs. head_and_neck

SEQ ID NO: 482681 - DNA, 171 bp, Homo sapiens; identical to SEQ ID NO: 340501
  chr10:373939-374110
  hypo
  uterine vs. lung

SEQ ID NO: 482682 - DNA, 250 bp, Homo sapiens
  chr10:482039-482289
  hypo
  uterine vs. cervical
cgaattcagttcagaccgggcgcacttcatgtactcagccaccacgtgtggtgagtgacagagatcatcttgcatgtgtgtccacattttactgcctttttcttgaccacagattctacctccggtttctctgtgtatgcagtgattgtttgcttaatattgcacattgtgggtaacgtgttgagcacgctcaggatcccataagcttcttcggaagctttccagctcttgttttagcaggcagcgcagg

SEQ ID NO: 482683 - DNA, 137 bp, Homo sapiens; identical to SEQ ID NO: 365217
  chr10:482318-482455
  hypo
  uterine vs. cervical

SEQ ID NO: 482684 - DNA, 258 bp, Homo sapiens; identical to SEQ ID NO: 340510
  chr10:851928-852186
  hypo
  uterine vs. liver_bileduct,colorectal,upper_gi

SEQ ID NO: 482685 - DNA, 136 bp, Homo sapiens; identical to SEQ ID NO: 340544
  chr10:5898121-5898257
  hypo
  uterine vs. melanoma

SEQ ID NO: 482686 - DNA, 130 bp, Homo sapiens; identical to SEQ ID NO: 340547
  chr10:6023448-6023578
  hypo

SEQ ID NO: 482687 - DNA, 61 bp, Homo sapiens; identical to SEQ ID NO: 459300
  chr10:7453036-7453097
  hypo
  uterine vs. ovary,melanoma,prostate,renal,breast, multiple_myeloma

SEQ ID NO: 482688 - DNA, 61 bp, Homo sapiens; identical to SEQ ID NO: 459300
  chr10:7453036-7453097
  hypo
  uterine vs. melanoma,ovary,breast,prostate,renal

SEQ ID NO: 482689 - DNA, 52 bp, Homo sapiens; identical to SEQ ID NO: 462290
  chr10:8097537-8097589
  hypo
  uterine vs. breast,myeloid_neoplasm

SEQ ID NO: 482690 - DNA, 41 bp, Homo sapiens
  chr10:15484072-15484113
  hypo
cgtctcaaaaataaaacgaaacaaaacaaaattctggcttg

SEQ ID NO: 482691 - DNA, 247 bp, Homo sapiens; identical to SEQ ID NO: 379259
  chr10:15484142-15484389
  hypo

SEQ ID NO: 482692 - DNA, 458 bp, Homo sapiens; identical to SEQ ID NO: 365308
  chr10:21797632-21798090
  hypo
  uterine vs. liver_bileduct

SEQ ID NO: 482693 - DNA, 4 bp, Homo sapiens
  chr10:22567321-22567325
  hypo
  uterine vs. renal,melanoma
cgac

SEQ ID NO: 482694 - DNA, 87 bp, Homo sapiens; identical to SEQ ID NO: 340601
  chr10:22883126-22883213
  hypo
  uterine vs. liver_bileduct,pancreas_gallbladder,melanoma, breast

SEQ ID NO: 482695 - DNA, 223 bp, Homo sapiens; identical to SEQ ID NO: 340607
  chr10:24863037-24863260
  hypo
  uterine vs. melanoma

SEQ ID NO: 482696 - DNA, 162 bp, Homo sapiens; identical to SEQ ID NO: 340658
  chr10:73445891-73446053
  hypo
  uterine vs. cervical,colorectal,upper_gi,breast, pancreas_gallbladder

SEQ ID NO: 482697 - DNA, 238 bp, Homo sapiens; identical to SEQ ID NO: 340659
  chr10:73514960-73515198
  hypo
  uterine vs. cervical,sarcoma,anorectal

SEQ ID NO: 482698 - DNA, 19 bp, Homo sapiens
  chr10:75384244-75384263
  hypo
  uterine vs. pancreas_gallbladder,lymphoid_neoplasm, colorectal
cgtgagtcaccgcgcccag

SEQ ID NO: 482699 - DNA, 168 bp, Homo sapiens; identical to SEQ ID NO: 340669
  chr10:76524062-76524230
  hypo
  uterine vs. melanoma

SEQ ID NO: 482700 - DNA, 51 bp, Homo sapiens; identical to SEQ ID NO: 365397
  chr10:98292796-98292847
  hypo
  uterine vs. lymphoid_neoplasm

SEQ ID NO: 482701 - DNA, 168 bp, Homo sapiens; identical to SEQ ID NO: 340728
  chr10:103817648-103817816
  hypo

SEQ ID NO: 482702 - DNA, 45 bp, Homo sapiens; identical to SEQ ID NO: 340742
  chr10:114343145-114343190
  hypo
  uterine vs. liver_bileduct,bladder_and_urothelial, pancreas_gallbladder,anorectal

SEQ ID NO: 482703 - DNA, 134 bp, Homo sapiens; identical to SEQ ID NO: 340762
  chr10:125017540-125017674
  hypo
  uterine vs. upper_gi

SEQ ID NO: 482704 - DNA, 358 bp, Homo sapiens; identical to SEQ ID NO: 340767
  chr10:126296075-126296433
  hypo
  uterine vs. liver_bileduct,cervical

SEQ ID NO: 482705 - DNA, 296 bp, Homo sapiens; identical to SEQ ID NO: 472714
  chr10:131647424-131647720
  hypo
  uterine vs. anorectal

SEQ ID NO: 482706 - DNA, 261 bp, Homo sapiens; identical to SEQ ID NO: 472716
  chr10:131844765-131845026
  hypo
  uterine vs. melanoma

SEQ ID NO: 482707 - DNA, 199 bp, Homo sapiens; identical to SEQ ID NO: 354619
  chr10:134477298-134477497
  hypo
  uterine vs. colorectal,cervical,liver_bileduct, pancreas_gallbladder,bladder_and_urothelial

SEQ ID NO: 482708 - DNA, 267 bp, Homo sapiens; identical to SEQ ID NO: 365483
  chr10:134491114-134491381
  hypo
  uterine vs. cervical,bladder_and_urothelial,upper_gi, colorectal,head_and_neck,breast,pancreas_gallbladder,anorectal

SEQ ID NO: 482709 - DNA, 592 bp, Homo sapiens; identical to SEQ ID NO: 472721
  chr10:134527015-134527607
  hypo
  uterine vs. lung,head_and_neck,anorectal,colorectal

SEQ ID NO: 482710 - DNA, 5 bp, Homo sapiens
  chr10:134527777-134527782
  hypo
  uterine vs. lung,head_and_neck,anorectal,colorectal
cggcg

SEQ ID NO: 482711 - DNA, 10 bp, Homo sapiens
  chr10:134527839-134527849
  hypo
  uterine vs. lung,head_and_neck,anorectal,colorectal
ccctttcacc

SEQ ID NO: 482712 - DNA, 529 bp, Homo sapiens; identical to SEQ ID NO: 340827
  chr10:134529092-134529621
  hypo
  uterine vs. upper_gi,anorectal,liver_bileduct,lung, bladder_and_urothelial,breast

SEQ ID NO: 482713 - DNA, 418 bp, Homo sapiens; identical to SEQ ID NO: 472727
  chr10:134592912-134593330
  hypo
  uterine vs. head_and_neck,upper_gi,breast,anorectal

SEQ ID NO: 482714 - DNA, 134 bp, Homo sapiens; identical to SEQ ID NO: 354625
  chr10:134593416-134593550
  hypo
  uterine vs. head_and_neck,upper_gi,breast,anorectal

SEQ ID NO: 482715 - DNA, 41 bp, Homo sapiens; identical to SEQ ID NO: 472730
  chr10:134610534-134610575
  hypo
  uterine vs. sarcoma,prostate,lymphoid_neoplasm

SEQ ID NO: 482716 - DNA, 20 bp, Homo sapiens
  chr10:134699327-134699347
  hypo
  uterine vs. cervical,lymphoid_neoplasm
cggtgggccgtccttggcag

SEQ ID NO: 482717 - DNA, 243 bp, Homo sapiens; identical to SEQ ID NO: 464957
  chr10:134699406-134699649
  hypo
  uterine vs. cervical,lymphoid_neoplasm

SEQ ID NO: 482718 - DNA, 231 bp, Homo sapiens; identical to SEQ ID NO: 454633
  chr10:134733835-134734066
  hypo
  uterine vs. anorectal,renal,lymphoid_neoplasm

SEQ ID NO: 482719 - DNA, 133 bp, Homo sapiens; identical to SEQ ID NO: 354633
  chr10:134796042-134796175
  hypo
  uterine vs. prostate

SEQ ID NO: 482720 - DNA, 306 bp, Homo sapiens; identical to SEQ ID NO: 464964
  chr10:134942147-134942453
  hypo
  uterine vs. lymphoid_neoplasm,renal

SEQ ID NO: 482721 - DNA, 27 bp, Homo sapiens
  chr10:135014662-135014689
  hypo
  uterine vs. renal
cgtgagggggcagagggacacagtcct

SEQ ID NO: 482722 - DNA, 55 bp, Homo sapiens
  chr10:135016995-135017050
  hypo
cgcacacggtgcagcgagggccgttctctggggcggctggagcagccggtgggca

SEQ ID NO: 482723 - DNA, 361 bp, Homo sapiens; identical to SEQ ID NO: 365516
  chr10:135017612-135017973
  hypo

SEQ ID NO: 482724 - DNA, 86 bp, Homo sapiens
  chr10:135022978-135023064
  hypo
  uterine vs. renal,anorectal,non_cancer,thyroid
cgcgtgtgtggtgtgcgcgtctggttgtggagttctgtgtggctttgtgcatgtgtgtggtgtgcgcgtctggttgtcgagttctg

SEQ ID NO: 482725 - DNA, 235 bp, Homo sapiens; identical to SEQ ID NO: 472740
  chr10:135153722-135153957
  hypo
  uterine vs. colorectal,renal,lymphoid_neoplasm, pancreas_gallbladder,prostate,cervical,non_cancer

SEQ ID NO: 482726 - DNA, 34 bp, Homo sapiens; identical to SEQ ID NO: 348457
  chr10:135154001-135154035
  hypo
  uterine vs. colorectal,renal,lymphoid_neoplasm, pancreas_gallbladder,prostate,cervical,non_cancer

SEQ ID NO: 482727 - DNA, 3 bp, Homo sapiens
  chr11:449674-449677
  hypo
cgc

SEQ ID NO: 482728 - DNA, 103 bp, Homo sapiens; identical to SEQ ID NO: 464970
  chr11:850444-850547
  hypo

SEQ ID NO: 482729 - DNA, 499 bp, Homo sapiens; identical to SEQ ID NO: 469568
  chr11:1103476-1103975
  hypo
  uterine vs. anorectal,colorectal

SEQ ID NO: 482730 - DNA, 20 bp, Homo sapiens
  chr11:1104214-1104234
  hypo
  uterine vs. anorectal,colorectal
cacctcccgccgggcccggc

SEQ ID NO: 482731 - DNA, 213 bp, Homo sapiens; identical to SEQ ID NO: 469570
  chr11:1103762-1103975
  hypo
  uterine vs. anorectal,colorectal

SEQ ID NO: 482732 - DNA, 313 bp, Homo sapiens; identical to SEQ ID NO: 365558
  chr11:1104214-1104527
  hypo
  uterine vs. anorectal,colorectal

SEQ ID NO: 482733 - DNA, 351 bp, Homo sapiens; identical to SEQ ID NO: 472758
  chr11:1466353-1466704
  hypo
  uterine vs. renal,prostate,lymphoid_neoplasm,melanoma

SEQ ID NO: 482734 - DNA, 21 bp, Homo sapiens
  chr11:1467211-1467232
  hypo
  uterine vs. renal,prostate,lymphoid_neoplasm,melanoma
tacccattggcctggggtctc

SEQ ID NO: 482735 - DNA, 35 bp, Homo sapiens; identical to SEQ ID NO: 379590
  chr11:1824257-1824292
  hypo
  uterine vs. cervical

SEQ ID NO: 482736 - DNA, 21 bp, Homo sapiens
  chr11:2209823-2209844
  hypo
  uterine vs. lymphoid_neoplasm,prostate
cgtaaaaaggcaactcccaga

SEQ ID NO: 482737 - DNA, 345 bp, Homo sapiens; identical to SEQ ID NO: 480287
  chr11:8041149-8041494
  hypo
  uterine vs. ovary

SEQ ID NO: 482738 - DNA, 68 bp, Homo sapiens; identical to SEQ ID NO: 340978
  chr11:9548334-9548402
  hypo
  uterine vs. lung,head_and_neck,upper_gi,liver_bileduct, pancreas_gallbladder,colorectal,lymphoid_neoplasm,cervical, bladder_and_urothelial,renal,melanoma

SEQ ID NO: 482739 - DNA, 120 bp, Homo sapiens
  chr11:63431997-63432117
  hypo
  uterine vs. lung,upper_gi,lymphoid_neoplasm,colorectal, bladder_and_urothelial,liver_bileduct,pancreas_gallbladder, anorectal,head_and_neck,breast
cgaaactctgtcttttaaaaaaaagcgtactgagcaatgtgaatgtaatgagcaatatcaatgtaatgacacacagcacatacaataagctattgtttttttgttttttttttttgagac

SEQ ID NO: 482740 - DNA, 197 bp, Homo sapiens; identical to SEQ ID NO: 341086
  chr11:63675233-63675430
  hypo
  uterine vs. bladder_and_urothelial

SEQ ID NO: 482741 - DNA, 63 bp, Homo sapiens; identical to SEQ ID NO: 341092
  chr11:63860763-63860826
  hypo
  uterine vs. bladder_and_urothelial

SEQ ID NO: 482742 - DNA, 550 bp, Homo sapiens; identical to SEQ ID NO: 455613
  chr11:64512349-64512899
  hypo
  uterine vs. ovary

SEQ ID NO: 482743 - DNA, 5 bp, Homo sapiens
  chr11:64578520-64578525
  hypo
  uterine vs. ovary
cgttt

SEQ ID NO: 482744 - DNA, 3 bp, Homo sapiens
  chr11:64578604-64578607
  hypo
  uterine vs. ovary
ttc

SEQ ID NO: 482745 - DNA, 79 bp, Homo sapiens
  chr11:66410904-66410983
  hypo
  uterine vs. melanoma,anorectal,colorectal,liver_bileduct, lymphoid_neoplasm,myeloid_neoplasm
cgtctgtttcttcaaggcaaacgaatgcacgtgcagttgtccaccagccggcttaggactgcgcccgggatgggagacc

SEQ ID NO: 482746 - DNA, 357 bp, Homo sapiens
  chr11:66411012-66411369
  hypo
  uterine vs. melanoma,anorectal,colorectal,liver_bileduct, lymphoid_neoplasm,myeloid_neoplasm
gggcactggtccaaagagtgtccgatagatcgttcaggccgcgtggcagacttgaccgagcaatataatgagcaatacggagcagtgcgtacgccttacaccatgagctatggggattcattgtattacaacaacgcgtacggagcgctcgatgcctactacaagcgctgccgtgctgcccggtcctatgaggcagtggcagctgcagctgcctccgtgtataattacgcagagcagaccctgtcccagctgccacaagtccagaatacagccatggccagtcacctcacctccacctctctcgatccctacgatagacacctgttgccgacctcaggagctgctgccacagctgct

SEQ ID NO: 482747 - DNA, 29 bp, Homo sapiens
  chr11:66411557-66411586
  hypo
  uterine vs. melanoma,anorectal,colorectal,liver_bileduct, lymphoid_neoplasm,myeloid_neoplasm
tgagcgggagcagtatgccgatcgggcgc

SEQ ID NO: 482748 - DNA, 33 bp, Homo sapiens; identical to SEQ ID NO: 477258
  chr11:66658557-66658590
  hypo
  uterine vs. liver_bileduct

SEQ ID NO: 482749 - DNA, 112 bp, Homo sapiens; identical to SEQ ID NO: 351230
  chr11:66886029-66886141
  hypo
  uterine vs. head_and_neck,cervical,lymphoid_neoplasm, pancreas_gallbladder,multiple_myeloma,bladder_and_urothelial

SEQ ID NO: 482750 - DNA, 56 bp, Homo sapiens; identical to SEQ ID NO: 341187
  chr11:73492566-73492622
  hypo
  uterine vs. colorectal,upper_gi

SEQ ID NO: 482751 - DNA, 118 bp, Homo sapiens; identical to SEQ ID NO: 341203
  chr11:77383112-77383230
  hypo
  uterine vs. lung,upper_gi

SEQ ID NO: 482752 - DNA, 676 bp, Homo sapiens; identical to SEQ ID NO: 481887
  chr11:92930674-92931350
  hypo
  uterine vs. lung,cervical,head_and_neck,sarcoma,breast, renal,ovary,multiple_myeloma,melanoma,pancreas_gallbladder, non_cancer,anorectal,prostate,bladder_and_urothelial

SEQ ID NO: 482753 - DNA, 45 bp, Homo sapiens; identical to SEQ ID NO: 341227
  chr11:112108650-112108695
  hypo
  uterine vs. liver_bileduct,lung

SEQ ID NO: 482754 - DNA, 81 bp, Homo sapiens; identical to SEQ ID NO: 365807
  chr11:114115648-114115729
  hypo
  uterine vs. anorectal

SEQ ID NO: 482755 - DNA, 54 bp, Homo sapiens
  chr11:120367550-120367604
  hypo
  uterine vs. breast
cgattaaactccgctttgtttcagagatgatcataatttggccagcttcatttc

SEQ ID NO: 482756 - DNA, 67 bp, Homo sapiens
  chr11:120367696-120367763
  hypo
  uterine vs. breast
gcttttcccttagtctgaaatgtactttggaaacttccaagatgagtattaaaagtaatagctggcc

SEQ ID NO: 482757 - DNA, 17 bp, Homo sapiens
  chr11:133938756-133938773
  hypo
  uterine vs. melanoma,sarcoma,ovary,thyroid, myeloid_neoplasm,prostate,non_cancer
cgccaagttcattgaaa

SEQ ID NO: 482758 - DNA, 161 bp, Homo sapiens; identical to SEQ ID NO: 345407
  chr11:133939437-133939598
  hypo
  uterine vs. melanoma,sarcoma,ovary,thyroid, myeloid_neoplasm,prostate,non_cancer

SEQ ID NO: 482759 - DNA, 245 bp, Homo sapiens; identical to SEQ ID NO: 452815
  chr12:4378558-4378803
  hypo
  uterine vs. colorectal,lymphoid_neoplasm,melanoma,ovary, non_cancer,myeloid_neoplasm

SEQ ID NO: 482760 - DNA, 88 bp, Homo sapiens; identical to SEQ ID NO: 454142
  chr12:4378715-4378803
  hypo
  uterine vs. colorectal,melanoma

SEQ ID NO: 482761 - DNA, 182 bp, Homo sapiens; identical to SEQ ID NO: 341338
  chr12:4672181-4672363
  hypo
  uterine vs. colorectal,melanoma

SEQ ID NO: 482762 - DNA, 73 bp, Homo sapiens; identical to SEQ ID NO: 465020
  chr12:6483496-6483569
  hypo
  uterine vs. sarcoma

SEQ ID NO: 482763 - DNA, 156 bp, Homo sapiens; identical to SEQ ID NO: 341362
  chr12:12605374-12605530
  hypo
  uterine vs. breast,head_and_neck,lung, pancreas_gallbladder,melanoma,lymphoid_neoplasm,cervical, sarcoma,liver_bileduct,bladder_and_urothelial

SEQ ID NO: 482764 - DNA, 84 bp, Homo sapiens; identical to SEQ ID NO: 454680
  chr12:29373882-29373966
  hypo
  uterine vs. head_and_neck

SEQ ID NO: 482765 - DNA, 18 bp, Homo sapiens
  chr12:29374085-29374103
  hypo
  uterine vs. head_and_neck
cgctttacctcttagtgc

SEQ ID NO: 482766 - DNA, 43 bp, Homo sapiens; identical to SEQ ID NO: 354900
  chr12:49989816-49989859
  hypo
  uterine vs. bladder_and_urothelial,upper_gi,lung, anorectal,pancreas_gallbladder,breast,colorectal

SEQ ID NO: 482767 - DNA, 37 bp, Homo sapiens; identical to SEQ ID NO: 348557
  chr12:51421646-51421683
  hypo
  uterine vs. melanoma,renal,sarcoma,prostate,thyroid, non_cancer,multiple_myeloma

SEQ ID NO: 482768 - DNA, 4 bp, Homo sapiens
  chr12:51565439-51565443
  hypo
  uterine vs. head_and_neck,anorectal
cgtg

SEQ ID NO: 482769 - DNA, 114 bp, Homo sapiens; identical to SEQ ID NO: 341425
  chr12:54122178-54122292
  hypo
  uterine vs. breast

SEQ ID NO: 482770 - DNA, 136 bp, Homo sapiens; identical to SEQ ID NO: 341435
  chr12:56183329-56183465
  hypo
  uterine vs. lung,liver_bileduct

SEQ ID NO: 482771 - DNA, 166 bp, Homo sapiens; identical to SEQ ID NO: 341438
  chr12:56604107-56604273
  hypo
  uterine vs. bladder_and_urothelial

SEQ ID NO: 482772 - DNA, 179 bp, Homo sapiens
  chr12:64797272-64797451
  hypo
  uterine vs. liver_bileduct
cggagtggcagtcaagtcgaggcagcctaagcctacactgcctctatgttgcattaataaattaataaatctgtgaccaaataaatgaagtgacatttagtagcatcgaaagatcccgtgagtaggacttcctaagaatgctctccttcttttcatggacaaaattttagtctgtttaa

SEQ ID NO: 482773 - DNA, 2 bp, Homo sapiens
  chr12:64797480-64797482
  hypo
  uterine vs. liver_bileduct
ac

SEQ ID NO: 482774 - DNA, 112 bp, Homo sapiens; identical to SEQ ID NO: 454686
  chr12:69999239-69999351
  hypo
  uterine vs. liver_bileduct

SEQ ID NO: 482775 - DNA, 255 bp, Homo sapiens; identical to SEQ ID NO: 365997
  chr12:79842637-79842892
  hypo
  uterine vs. lung

SEQ ID NO: 482776 - DNA, 265 bp, Homo sapiens; identical to SEQ ID NO: 468722
  chr12:93966037-93966302
  hypo
  uterine vs. anorectal,sarcoma,bladder_and_urothelial, prostate

SEQ ID NO: 482777 - DNA, 349 bp, Homo sapiens; identical to SEQ ID NO: 459395
  chr12:104851545-104851894
  hypo
  uterine vs. ovary

SEQ ID NO: 482778 - DNA, 211 bp, Homo sapiens; identical to SEQ ID NO: 341478
  chr12:105472684-105472895
  hypo
  uterine vs. liver_bileduct

SEQ ID NO: 482779 - DNA, 321 bp, Homo sapiens; identical to SEQ ID NO: 455674
  chr12:111844290-111844611
  hypo
  uterine vs. lymphoid_neoplasm,anorectal,liver_bileduct, cervical,multiple_myeloma,upper_gi

SEQ ID NO: 482780 - DNA, 555 bp, Homo sapiens; identical to SEQ ID NO: 465041
  chr12:114273212-114273767
  hypo
  uterine vs. liver_bileduct

SEQ ID NO: 482781 - DNA, 134 bp, Homo sapiens; identical to SEQ ID NO: 366049
  chr12:114273850-114273984
  hypo
  uterine vs. liver_bileduct

SEQ ID NO: 482782 - DNA, 169 bp, Homo sapiens; identical to SEQ ID NO: 341528
  chr12:116394813-116394982
  hypo
  uterine vs. upper_gi

SEQ ID NO: 482783 - DNA, 123 bp, Homo sapiens; identical to SEQ ID NO: 341584
  chr12:122970391-122970514
  hypo
  uterine vs. head_and_neck

SEQ ID NO: 482784 - DNA, 112 bp, Homo sapiens; identical to SEQ ID NO: 341591
  chr12:123986845-123986957
  hypo
  uterine vs. upper_gi

SEQ ID NO: 482785 - DNA, 84 bp, Homo sapiens; identical to SEQ ID NO: 341596
  chr12:124832004-124832088
  hypo
  uterine vs. upper_gi

SEQ ID NO: 482786 - DNA, 183 bp, Homo sapiens; identical to SEQ ID NO: 380274
  chr12:130493339-130493522
  hypo
  uterine vs. lung

SEQ ID NO: 482787 - DNA, 210 bp, Homo sapiens
  chr12:132983184-132983394
  hypo
  uterine vs. lymphoid_neoplasm
cgccgccctcgacatccccagcacagacgccgccgtcgacgttcccagtgcagacaccgccctcgacgttttcccagccaggacgccgccctcaacattcccagaggggacgccgccctcgacattcccagcaggcgcagctcaggagcaccttgccatctgcagctccctgggggacgagaagaaacagcagccacccctttctcgggc

SEQ ID NO: 482788 - DNA, 224 bp, Homo sapiens; identical to SEQ ID NO: 366188
  chr12:132983766-132983990
  hypo
  uterine vs. lymphoid_neoplasm

SEQ ID NO: 482789 - DNA, 178 bp, Homo sapiens; identical to SEQ ID NO: 460058
  chr12:132986274-132986452
  hypo

SEQ ID NO: 482790 - DNA, 268 bp, Homo sapiens; identical to SEQ ID NO: 366190
  chr12:132986701-132986969
  hypo

SEQ ID NO: 482791 - DNA, 500 bp, Homo sapiens; identical to SEQ ID NO: 366195
  chr12:133121644-133122144
  hypo
  uterine vs. melanoma

SEQ ID NO: 482792 - DNA, 19 bp, Homo sapiens
  chr13:20392340-20392359
  hypo
  uterine vs. cervical,melanoma,sarcoma,anorectal, colorectal
cggtgggtgatttggggta

SEQ ID NO: 482793 - DNA, 261 bp, Homo sapiens; identical to SEQ ID NO: 355030
  chr13:20392445-20392706
  hypo
  uterine vs. cervical,melanoma,sarcoma,anorectal, colorectal

SEQ ID NO: 482794 - DNA, 126 bp, Homo sapiens; identical to SEQ ID NO: 472834
  chr13:28745545-28745671
  hypo
  uterine vs. liver_bileduct,pancreas_gallbladder, head_and_neck,melanoma,lymphoid_neoplasm,sarcoma

SEQ ID NO: 482795 - DNA, 100 bp, Homo sapiens; identical to SEQ ID NO: 346075
  chr13:30123381-30123481
  hypo
  uterine vs. bladder_and_urothelial,head_and_neck,lung, breast,sarcoma,lymphoid_neoplasm,multiple_myeloma

SEQ ID NO: 482796 - DNA, 242 bp, Homo sapiens; identical to SEQ ID NO: 341714
  chr13:31002082-31002324
  hypo
  uterine vs. breast,lung,pancreas_gallbladder

SEQ ID NO: 482797 - DNA, 116 bp, Homo sapiens; identical to SEQ ID NO: 341718
  chr13:32983242-32983358
  hypo
  uterine vs. melanoma,liver_bileduct

SEQ ID NO: 482798 - DNA, 178 bp, Homo sapiens; identical to SEQ ID NO: 468743
  chr13:33000891-33001069
  hypo
  uterine vs. anorectal

SEQ ID NO: 482799 - DNA, 204 bp, Homo sapiens; identical to SEQ ID NO: 351462
  chr13:33001228-33001432
  hypo
  uterine vs. anorectal

SEQ ID NO: 482800 - DNA, 86 bp, Homo sapiens; identical to SEQ ID NO: 472836
  chr13:37643604-37643690
  hypo
  uterine vs. melanoma

SEQ ID NO: 482801 - DNA, 86 bp, Homo sapiens; identical to SEQ ID NO: 341729
  chr13:43620991-43621077
  hypo
  uterine vs. head_and_neck

SEQ ID NO: 482802 - DNA, 298 bp, Homo sapiens; identical to SEQ ID NO: 341736
  chr13:49879457-49879755
  hypo
  uterine vs. bladder_and_urothelial

SEQ ID NO: 482803 - DNA, 73 bp, Homo sapiens; identical to SEQ ID NO: 341743
  chr13:60267291-60267364
  hypo
  uterine vs. cervical

SEQ ID NO: 482804 - DNA, 438 bp, Homo sapiens; identical to SEQ ID NO: 341762
  chr13:96085837-96086275
  hypo
  uterine vs. cervical,head_and_neck

SEQ ID NO: 482805 - DNA, 73 bp, Homo sapiens; identical to SEQ ID NO: 355060
  chr13:96409644-96409717
  hypo
  uterine vs. pancreas_gallbladder,liver_bileduct

SEQ ID NO: 482806 - DNA, 127 bp, Homo sapiens; identical to SEQ ID NO: 459410
  chr13:103046539-103046666
  hypo
  uterine vs. melanoma,ovary,sarcoma,thyroid,renal, anorectal,breast,multiple_myeloma,non_cancer

SEQ ID NO: 482807 - DNA, 181 bp, Homo sapiens; identical to SEQ ID NO: 341786
  chr13:110008382-110008563
  hypo
  uterine vs. melanoma,pancreas_gallbladder

SEQ ID NO: 482808 - DNA, 42 bp, Homo sapiens; identical to SEQ ID NO: 460080
  chr13:111363839-111363881
  hypo

SEQ ID NO: 482809 - DNA, 95 bp, Homo sapiens; identical to SEQ ID NO: 366278
  chr13:111978023-111978118
  hypo
  uterine vs. cervical

SEQ ID NO: 482810 - DNA, 4 bp, Homo sapiens
  chr13:113107708-113107712
  hypo
  uterine vs. anorectal
cgga

SEQ ID NO: 482811 - DNA, 178 bp, Homo sapiens; identical to SEQ ID NO: 470175
  chr13:113797753-113797931
  hypo
  uterine vs. liver_bileduct

SEQ ID NO: 482812 - DNA, 112 bp, Homo sapiens; identical to SEQ ID NO: 348614
  chr13:113797960-113798072
  hypo
  uterine vs. liver_bileduct

SEQ ID NO: 482813 - DNA, 163 bp, Homo sapiens; identical to SEQ ID NO: 355095
  chr13:114123291-114123454
  hypo
  uterine vs. melanoma

SEQ ID NO: 482814 - DNA, 189 bp, Homo sapiens; identical to SEQ ID NO: 366321
  chr13:114193080-114193269
  hypo
  uterine vs. liver_bileduct,lung,upper_gi

SEQ ID NO: 482815 - DNA, 162 bp, Homo sapiens; identical to SEQ ID NO: 465091
  chr13:114271763-114271925
  hypo
  uterine vs. melanoma

SEQ ID NO: 482816 - DNA, 18 bp, Homo sapiens
  chr13:114497796-114497814
  hypo
  uterine vs. lymphoid_neoplasm,renal,thyroid, myeloid_neoplasm,non_cancer
cgtgtgatgagcacacat

SEQ ID NO: 482817 - DNA, 139 bp, Homo sapiens; identical to SEQ ID NO: 454748
  chr13:114748186-114748325
  hypo
  uterine vs. melanoma,renal,breast,non_cancer, lymphoid_neoplasm,thyroid

SEQ ID NO: 482818 - DNA, 223 bp, Homo sapiens; identical to SEQ ID NO: 454169
  chr13:114776788-114777011
  hypo
  uterine vs. pancreas_gallbladder

SEQ ID NO: 482819 - DNA, 130 bp, Homo sapiens; identical to SEQ ID NO: 341870
  chr13:114777587-114777717
  hypo

SEQ ID NO: 482820 - DNA, 77 bp, Homo sapiens; identical to SEQ ID NO: 380520
  chr13:114778731-114778808
  hypo

SEQ ID NO: 482821 - DNA, 63 bp, Homo sapiens; identical to SEQ ID NO: 460088
  chr13:114917508-114917571
  hypo
  uterine vs. cervical

SEQ ID NO: 482822 - DNA, 96 bp, Homo sapiens; identical to SEQ ID NO: 366347
  chr13:114917600-114917696
  hypo
  uterine vs. cervical

SEQ ID NO: 482823 - DNA, 78 bp, Homo sapiens; identical to SEQ ID NO: 351523
  chr14:23835314-23835392
  hypo
  uterine vs. head_and_neck,cervical,anorectal,sarcoma, multiple_myeloma

SEQ ID NO: 482824 - DNA, 383 bp, Homo sapiens; identical to SEQ ID NO: 481941
  chr14:38677790-38678173
  hypo
  uterine vs. upper_gi,colorectal

SEQ ID NO: 482825 - DNA, 284 bp, Homo sapiens; identical to SEQ ID NO: 373410
  chr14:38678202-38678486
  hypo
  uterine vs. upper_gi,colorectal

SEQ ID NO: 482826 - DNA, 317 bp, Homo sapiens
  chr14:39648098-39648415
  hypo
  uterine vs. liver_bileduct,upper_gi,head_and_neck, colorectal,lung
cgccctgttaatttttttgtgtttttagtagagatggtggtgttggcttctgacttcagatgatctacctgcctctaatgtttcacgtaattagtatgtgtaataactttttatcataattgaactgaaatcatatataccttttgttgtaactatttcaacacgtaagtattaaagcaggctacttaacttttagcaaaagcggcgccaggaaattgaacaaaaacttgaagttcaggcagaagaagagagaaagcaggttgaaaatgaaaggagagaactgtttgaagagaggcgtgctaaacagacagaactgc

SEQ ID NO: 482827 - DNA, 201 bp, Homo sapiens; identical to SEQ ID NO: 351548
  chr14:45431382-45431583
  hypo
  uterine vs. lung,ovary,breast,pancreas_gallbladder

SEQ ID NO: 482828 - DNA, 215 bp, Homo sapiens; identical to SEQ ID NO: 473766
  chr14:51562012-51562227
  hypo
  uterine vs. sarcoma

SEQ ID NO: 482829 - DNA, 95 bp, Homo sapiens; identical to SEQ ID NO: 341911
  chr14:53564384-53564479
  hypo
  uterine vs. liver_bileduct

SEQ ID NO: 482830 - DNA, 297 bp, Homo sapiens; identical to SEQ ID NO: 456486
  chr14:55765714-55766011
  hypo
  uterine vs. liver_bileduct,cervical,melanoma, lymphoid_neoplasm,anorectal,colorectal

SEQ ID NO: 482831 - DNA, 55 bp, Homo sapiens; identical to SEQ ID NO: 346085
  chr14:55766084-55766139
  hypo
  uterine vs. liver_bileduct,cervical,melanoma, lymphoid_neoplasm,anorectal,colorectal

SEQ ID NO: 482832 - DNA, 45 bp, Homo sapiens; identical to SEQ ID NO: 452878
  chr14:60385935-60385980
  hypo
  uterine vs. ovary,myeloid_neoplasm,thyroid

SEQ ID NO: 482833 - DNA, 7 bp, Homo sapiens
  chr14:60386737-60386744
  hypo
  uterine vs. ovary,myeloid_neoplasm,thyroid
caaaccc

SEQ ID NO: 482834 - DNA, 50 bp, Homo sapiens; identical to SEQ ID NO: 355132
  chr14:65239794-65239844
  hypo
  uterine vs. lymphoid_neoplasm,colorectal,non_cancer, renal,thyroid,prostate

SEQ ID NO: 482835 - DNA, 9 bp, Homo sapiens
  chr14:70654358-70654367
  hypo
  uterine vs. multiple_myeloma,thyroid,non_cancer,sarcoma, myeloid_neoplasm,renal
cgcgcgcgc

SEQ ID NO: 482836 - DNA, 13 bp, Homo sapiens
  chr14:73175210-73175223
  hypo
gcctgaaggccgc

SEQ ID NO: 482837 - DNA, 1 bp, Homo sapiens
  chr14:73602342-73602343
  hypo
  uterine vs. melanoma,renal,sarcoma
c

SEQ ID NO: 482838 - DNA, 164 bp, Homo sapiens; identical to SEQ ID NO: 481960
  chr14:88458964-88459128
  hypo
  uterine vs. ovary

SEQ ID NO: 482839 - DNA, 240 bp, Homo sapiens; identical to SEQ ID NO: 481961
  chr14:88459170-88459410
  hypo
  uterine vs. ovary

SEQ ID NO: 482840 - DNA, 57 bp, Homo sapiens; identical to SEQ ID NO: 351598
  chr14:88459631-88459688
  hypo
  uterine vs. ovary

SEQ ID NO: 482841 - DNA, 82 bp, Homo sapiens; identical to SEQ ID NO: 341978
  chr14:89291884-89291966
  hypo
  uterine vs. head_and_neck

SEQ ID NO: 482842 - DNA, 383 bp, Homo sapiens; identical to SEQ ID NO: 454181
  chr14:90849476-90849859
  hypo
  uterine vs. ovary,anorectal,upper_gi

SEQ ID NO: 482843 - DNA, 54 bp, Homo sapiens; identical to SEQ ID NO: 454182
  chr14:90849897-90849951
  hypo
  uterine vs. ovary,anorectal,upper_gi

SEQ ID NO: 482844 - DNA, 137 bp, Homo sapiens; identical to SEQ ID NO: 454183
  chr14:90849722-90849859
  hypo
  uterine vs. anorectal

SEQ ID NO: 482845 - DNA, 54 bp, Homo sapiens; identical to SEQ ID NO: 454182
  chr14:90849897-90849951
  hypo
  uterine vs. anorectal

SEQ ID NO: 482846 - DNA, 145 bp, Homo sapiens; identical to SEQ ID NO: 341993
  chr14:91750824-91750969
  hypo
  uterine vs. upper_gi,ovary

SEQ ID NO: 482847 - DNA, 15 bp, Homo sapiens
  chr14:97262872-97262887
  hypo
  uterine vs. cervical
ggcgcggtggctcac

SEQ ID NO: 482848 - DNA, 206 bp, Homo sapiens; identical to SEQ ID NO: 373549
  chr14:100751380-100751586
  hypo
  uterine vs. lung

SEQ ID NO: 482849 - DNA, 365 bp, Homo sapiens; identical to SEQ ID NO: 342061
  chr14:103409913-103410278
  hypo
  uterine vs. colorectal

SEQ ID NO: 482850 - DNA, 130 bp, Homo sapiens; identical to SEQ ID NO: 456501
  chr14:104159892-104160022
  hypo
  uterine vs. melanoma,lymphoid_neoplasm

SEQ ID NO: 482851 - DNA, 3 bp, Homo sapiens
  chr14:104160058-104160061
  hypo
  uterine vs. melanoma,lymphoid_neoplasm
cct

SEQ ID NO: 482852 - DNA, 123 bp, Homo sapiens; identical to SEQ ID NO: 355201
  chr14:104160134-104160257
  hypo
  uterine vs. melanoma,lymphoid_neoplasm

SEQ ID NO: 482853 - DNA, 7 bp, Homo sapiens
  chr14:104618440-104618447
  hypo
  uterine vs. cervical,anorectal,colorectal,non_cancer, thyroid,renal,lymphoid_neoplasm,prostate,head_and_neck
cgtctgc

SEQ ID NO: 482854 - DNA, 237 bp, Homo sapiens; identical to SEQ ID NO: 454786
  chr14:104618440-104618677
  hypo
  uterine vs. anorectal,cervical,colorectal,non_cancer, thyroid,lymphoid_neoplasm,prostate,renal,head_and_neck, myeloid_neoplasm

SEQ ID NO: 482855 - DNA, 3 bp, Homo sapiens
  chr14:104639887-104639890
  hypo
  uterine vs. lymphoid_neoplasm,renal
tgc

SEQ ID NO: 482856 - DNA, 140 bp, Homo sapiens; identical to SEQ ID NO: 454790
  chr14:104641166-104641306
  hypo

SEQ ID NO: 482857 - DNA, 212 bp, Homo sapiens; identical to SEQ ID NO: 470194
  chr14:104642243-104642455
  hypo
  uterine vs. cervical,anorectal

SEQ ID NO: 482858 - DNA, 119 bp, Homo sapiens; identical to SEQ ID NO: 366513
  chr14:104642742-104642861
  hypo
  uterine vs. cervical,anorectal

SEQ ID NO: 482859 - DNA, 164 bp, Homo sapiens; identical to SEQ ID NO: 470196
  chr14:104645553-104645717
  hypo
  uterine vs. lymphoid_neoplasm,anorectal

SEQ ID NO: 482860 - DNA, 3 bp, Homo sapiens
  chr14:104646706-104646709
  hypo
  uterine vs. anorectal,lymphoid_neoplasm,cervical
ccc

SEQ ID NO: 482861 - DNA, 640 bp, Homo sapiens; identical to SEQ ID NO: 342110
  chr14:105687735-105688375
  hypo
  uterine vs. bladder_and_urothelial,head_and_neck, pancreas_gallbladder,upper_gi,colorectal,breast,cervical, melanoma,lymphoid_neoplasm,sarcoma,anorectal,renal, liver_bileduct,multiple_myeloma

SEQ ID NO: 482862 - DNA, 423 bp, Homo sapiens; identical to SEQ ID NO: 465137
  chr14:105689521-105689944
  hypo
  uterine vs. breast,lymphoid_neoplasm

SEQ ID NO: 482863 - DNA, 197 bp, Homo sapiens
  chr15:40423149-40423346
  hypo
  uterine vs. sarcoma
cgattgttaataataattattaatattattcctgatatccagggggtcgaggatgacattgcttcctatacctcagaacacgtacacccccatgtgatgttgttcctaataaccagggggtagaggatgacgttactccaaatatcgccgtgggtgtacatcccttctgcgatcttgttgctaatacccaggcgggg

SEQ ID NO: 482864 - DNA, 338 bp, Homo sapiens; identical to SEQ ID NO: 457559
  chr15:45722600-45722938
  hypo
  uterine vs. renal,pancreas_gallbladder, bladder_and_urothelial,upper_gi,anorectal,breast,colorectal, prostate,multiple_myeloma,myeloid_neoplasm,non_cancer,thyroid, liver_bileduct,ovary,lung,cervical

SEQ ID NO: 482865 - DNA, 153 bp, Homo sapiens; identical to SEQ ID NO: 342203
  chr15:63066085-63066238
  hypo
  uterine vs. bladder_and_urothelial,melanoma,breast, anorectal,cervical,colorectal,upper_gi,pancreas_gallbladder, prostate,lung,head_and_neck

SEQ ID NO: 482866 - DNA, 179 bp, Homo sapiens; identical to SEQ ID NO: 342217
  chr15:64674712-64674891
  hypo
  uterine vs. colorectal

SEQ ID NO: 482867 - DNA, 839 bp, Homo sapiens; identical to SEQ ID NO: 454202
  chr15:80215691-80216530
  hypo
  uterine vs. lung,ovary

SEQ ID NO: 482868 - DNA, 757 bp, Homo sapiens; identical to SEQ ID NO: 335233
  chr15:94774574-94775331
  hypo
  uterine vs. cervical

SEQ ID NO: 482869 - DNA, 322 bp, Homo sapiens; identical to SEQ ID NO: 463387
  chr15:99459893-99460215
  hypo
  uterine vs. colorectal,cervical

SEQ ID NO: 482870 - DNA, 4 bp, Homo sapiens
  chr15:99460268-99460272
  hypo
  uterine vs. colorectal,cervical
ctgc

SEQ ID NO: 482871 - DNA, 86 bp, Homo sapiens; identical to SEQ ID NO: 463393
  chr15:99506062-99506148
  hypo
  uterine vs. bladder_and_urothelial,melanoma,cervical, head_and_neck,breast,lung,pancreas_gallbladder,colorectal, sarcoma

SEQ ID NO: 482872 - DNA, 21 bp, Homo sapiens
  chr15:99506177-99506198
  hypo
  uterine vs. bladder_and_urothelial,melanoma,cervical, head_and_neck,breast,lung,pancreas_gallbladder,colorectal, sarcoma
atgtcccacgtgtgtgtgtcc

SEQ ID NO: 482873 - DNA, 148 bp, Homo sapiens; identical to SEQ ID NO: 342314
  chr15:101464778-101464926
  hypo
  uterine vs. upper_gi

SEQ ID NO: 482874 - DNA, 121 bp, Homo sapiens; identical to SEQ ID NO: 454816
  chr16:189550-189671
  hypo
  uterine vs. lymphoid_neoplasm

SEQ ID NO: 482875 - DNA, 101 bp, Homo sapiens; identical to SEQ ID NO: 454819
  chr16:410895-410996
  hypo
  uterine vs. renal,lymphoid_neoplasm,prostate,non_cancer

SEQ ID NO: 482876 - DNA, 111 bp, Homo sapiens; identical to SEQ ID NO: 346109
  chr16:411606-411717
  hypo
  uterine vs. renal,lymphoid_neoplasm,prostate,non_cancer

SEQ ID NO: 482877 - DNA, 72 bp, Homo sapiens; identical to SEQ ID NO: 342335
  chr16:440413-440485
  hypo
  uterine vs. colorectal,pancreas_gallbladder, liver_bileduct,breast

SEQ ID NO: 482878 - DNA, 294 bp, Homo sapiens
  chr16:894572-894866
  hypo
  uterine vs. anorectal
cgagctccaacatgtccacgggtgaacatcagcgtggccaccaccaggtccagagcacagtagaccctgtgccgccagtgtccgtcgccttccacacgtggccgcagttctgtgcatggggccgcccgccatcctgccgcctctgacctgggctgtgggctcgtgacacgtgtctgagctttccagtcgtggccgtgacgctctgtgcggaggctccgtccgcgtgctgcctccgtcccctctgccctggacggccactcactacctttgtctctcaccctgggggtttcatga

SEQ ID NO: 482879 - DNA, 60 bp, Homo sapiens
  chr16:1113830-1113890
  hypo
  uterine vs. melanoma
cggtgagccggcgtcgtggccacagccttcacactcccagccgctgcaggtccccgtttc

SEQ ID NO: 482880 - DNA, 82 bp, Homo sapiens; identical to SEQ ID NO: 461555
  chr16:1154990-1155072
  hypo
  uterine vs. anorectal

SEQ ID NO: 482881 - DNA, 132 bp, Homo sapiens; identical to SEQ ID NO: 472914
  chr16:1248221-1248353
  hypo
  uterine vs. lymphoid_neoplasm,renal,non_cancer,thyroid

SEQ ID NO: 482882 - DNA, 88 bp, Homo sapiens; identical to SEQ ID NO: 355347
  chr16:1248922-1249010
  hypo
  uterine vs. lymphoid_neoplasm,renal,non_cancer,thyroid

SEQ ID NO: 482883 - DNA, 189 bp, Homo sapiens; identical to SEQ ID NO: 366737
  chr16:1250534-1250723
  hypo
  uterine vs. pancreas_gallbladder

SEQ ID NO: 482884 - DNA, 319 bp, Homo sapiens; identical to SEQ ID NO: 366738
  chr16:1251835-1252154
  hypo
  uterine vs. anorectal

SEQ ID NO: 482885 - DNA, 1 bp, Homo sapiens
  chr16:1253065-1253066
  hypo
  uterine vs. sarcoma
c

SEQ ID NO: 482886 - DNA, 182 bp, Homo sapiens; identical to SEQ ID NO: 380999
  chr16:1253116-1253298
  hypo
  uterine vs. sarcoma

SEQ ID NO: 482887 - DNA, 133 bp, Homo sapiens; identical to SEQ ID NO: 470230
  chr16:1270065-1270198
  hypo
  uterine vs. anorectal

SEQ ID NO: 482888 - DNA, 332 bp, Homo sapiens; identical to SEQ ID NO: 381003
  chr16:1270449-1270781
  hypo
  uterine vs. anorectal

SEQ ID NO: 482889 - DNA, 195 bp, Homo sapiens; identical to SEQ ID NO: 456532
  chr16:1730112-1730307
  hypo
  uterine vs. melanoma,colorectal,multiple_myeloma, cervical,lymphoid_neoplasm,non_cancer,bladder_and_urothelial

SEQ ID NO: 482890 - DNA, 105 bp, Homo sapiens; identical to SEQ ID NO: 346116
  chr16:1730761-1730866
  hypo
  uterine vs. melanoma,colorectal,multiple_myeloma, cervical,lymphoid_neoplasm,non_cancer,bladder_and_urothelial

SEQ ID NO: 482891 - DNA, 48 bp, Homo sapiens; identical to SEQ ID NO: 345484
  chr16:2042503-2042551
  hypo
  uterine vs. anorectal

SEQ ID NO: 482892 - DNA, 68 bp, Homo sapiens; identical to SEQ ID NO: 465182
  chr16:2106533-2106601
  hypo
  uterine vs. upper_gi,cervical,colorectal,breast, bladder_and_urothelial,melanoma,anorectal,head_and_neck,renal, pancreas_gallbladder

SEQ ID NO: 482893 - DNA, 63 bp, Homo sapiens; identical to SEQ ID NO: 465183
  chr16:2106641-2106704
  hypo
  uterine vs. upper_gi,cervical,colorectal,breast, bladder_and_urothelial,melanoma,anorectal,head_and_neck,renal, pancreas_gallbladder

SEQ ID NO: 482894 - DNA, 23 bp, Homo sapiens
  chr16:2106732-2106755
  hypo
  uterine vs. upper_gi,cervical,colorectal,breast, bladder_and_urothelial,melanoma,anorectal,head_and_neck,renal, pancreas_gallbladder
ccatcaacgtcaaggagctctgc

SEQ ID NO: 482895 - DNA, 28 bp, Homo sapiens
  chr16:2106988-2107016
  hypo
  uterine vs. bladder_and_urothelial,head_and_neck, upper_gi,melanoma,colorectal,renal,pancreas_gallbladder, anorectal,cervical,multiple_myeloma,breast,lymphoid_neoplasm, prostate
cgagctggccggaccttgggtggctata

SEQ ID NO: 482896 - DNA, 426 bp, Homo sapiens; identical to SEQ ID NO: 346122
  chr16:2107057-2107483
  hypo
  uterine vs. bladder_and_urothelial,head_and_neck, upper_gi,melanoma,colorectal,renal,pancreas_gallbladder, anorectal,cervical,multiple_myeloma,breast,lymphoid_neoplasm, prostate

SEQ ID NO: 482897 - DNA, 440 bp, Homo sapiens; identical to SEQ ID NO: 342413
  chr16:2108531-2108971
  hypo
  uterine vs. upper_gi,melanoma

SEQ ID NO: 482898 - DNA, 179 bp, Homo sapiens; identical to SEQ ID NO: 342450
  chr16:3811586-3811765
  hypo
  uterine vs. liver_bileduct

SEQ ID NO: 482899 - DNA, 3 bp, Homo sapiens
  chr16:4203909-4203912
  hypo
  uterine vs. bladder_and_urothelial,cervical,melanoma, sarcoma,anorectal,colorectal,head_and_neck,lymphoid_neoplasm, renal
cga

SEQ ID NO: 482900 - DNA, 193 bp, Homo sapiens; identical to SEQ ID NO: 348725
  chr16:4203995-4204188
  hypo
  uterine vs. bladder_and_urothelial,cervical,melanoma, sarcoma,anorectal,colorectal,head_and_neck,lymphoid_neoplasm, renal

SEQ ID NO: 482901 - DNA, 147 bp, Homo sapiens; identical to SEQ ID NO: 456554
  chr16:12132253-12132400
  hypo
  uterine vs. cervical,colorectal

SEQ ID NO: 482902 - DNA, 376 bp, Homo sapiens; identical to SEQ ID NO: 355427
  chr16:12132450-12132826
  hypo
  uterine vs. cervical,colorectal

SEQ ID NO: 482903 - DNA, 10 bp, Homo sapiens
  chr16:23846783-23846793
  hypo
  uterine vs. non_cancer,thyroid
cgctcctccc

SEQ ID NO: 482904 - DNA, 594 bp, Homo sapiens; identical to SEQ ID NO: 342536
  chr16:27780854-27781448
  hypo
  uterine vs. bladder_and_urothelial

SEQ ID NO: 482905 - DNA, 201 bp, Homo sapiens; identical to SEQ ID NO: 456569
  chr16:31138407-31138608
  hypo
  uterine vs. liver_bileduct,melanoma, bladder_and_urothelial,colorectal

SEQ ID NO: 482906 - DNA, 507 bp, Homo sapiens; identical to SEQ ID NO: 342569
  chr16:46683305-46683812
  hypo
  uterine vs. anorectal,head_and_neck,colorectal, lymphoid_neoplasm

SEQ ID NO: 482907 - DNA, 57 bp, Homo sapiens; identical to SEQ ID NO: 342601
  chr16:58633220-58633277
  hypo
  uterine vs. bladder_and_urothelial,breast,head_and_neck, upper_gi,cervical,pancreas_gallbladder,colorectal

SEQ ID NO: 482908 - DNA, 111 bp, Homo sapiens; identical to SEQ ID NO: 342629
  chr16:69922460-69922571
  hypo
  uterine vs. head_and_neck,colorectal,liver_bileduct, pancreas_gallbladder,lung,cervical

SEQ ID NO: 482909 - DNA, 86 bp, Homo sapiens; identical to SEQ ID NO: 342644
  chr16:74984568-74984654
  hypo
  uterine vs. colorectal

SEQ ID NO: 482910 - DNA, 61 bp, Homo sapiens; identical to SEQ ID NO: 453709
  chr16:75148493-75148554
  hypo
  uterine vs. renal

SEQ ID NO: 482911 - DNA, 136 bp, Homo sapiens; identical to SEQ ID NO: 348759
  chr16:75149151-75149287
  hypo
  uterine vs. renal

SEQ ID NO: 482912 - DNA, 50 bp, Homo sapiens; identical to SEQ ID NO: 465237
  chr16:85517169-85517219
  hypo
  uterine vs. renal,sarcoma,cervical,breast,anorectal, non_cancer

SEQ ID NO: 482913 - DNA, 137 bp, Homo sapiens; identical to SEQ ID NO: 355510
  chr16:85517620-85517757
  hypo
  uterine vs. renal,sarcoma,cervical,breast,anorectal, non_cancer

SEQ ID NO: 482914 - DNA, 67 bp, Homo sapiens; identical to SEQ ID NO: 465239
  chr16:85617682-85617749
  hypo
  uterine vs. liver_bileduct

SEQ ID NO: 482915 - DNA, 143 bp, Homo sapiens; identical to SEQ ID NO: 342702
  chr16:85618063-85618206
  hypo
  uterine vs. liver_bileduct

SEQ ID NO: 482916 - DNA, 45 bp, Homo sapiens; identical to SEQ ID NO: 477437
  chr16:85683926-85683971
  hypo
  uterine vs. cervical

SEQ ID NO: 482917 - DNA, 178 bp, Homo sapiens; identical to SEQ ID NO: 452923
  chr16:85932121-85932299
  hypo
  uterine vs. upper_gi,colorectal

SEQ ID NO: 482918 - DNA, 67 bp, Homo sapiens; identical to SEQ ID NO: 481390
  chr16:87594891-87594958
  hypo
  uterine vs. anorectal,lymphoid_neoplasm

SEQ ID NO: 482919 - DNA, 104 bp, Homo sapiens
  chr16:88791422-88791526
  hypo
  uterine vs. cervical
cgtggtccagccagggccgccaccactgcctccgtggcggggaggagccccctggactgtcgggccctgtggaggggcagggtgagcatgaggcagcagtcaag

SEQ ID NO: 482920 - DNA, 354 bp, Homo sapiens; identical to SEQ ID NO: 355537
  chr16:88791819-88792173
  hypo
  uterine vs. cervical

SEQ ID NO: 482921 - DNA, 518 bp, Homo sapiens; identical to SEQ ID NO: 465247
  chr16:88792758-88793276
  hypo
  uterine vs. bladder_and_urothelial,pancreas_gallbladder, colorectal,upper_gi,head_and_neck,melanoma,breast,anorectal, renal,cervical

SEQ ID NO: 482922 - DNA, 29 bp, Homo sapiens
  chr16:88793673-88793702
  hypo
  uterine vs. bladder_and_urothelial,pancreas_gallbladder, colorectal,upper_gi,head_and_neck,melanoma,breast,anorectal, renal,cervical
tcccaccccaggcctgtcggcgtgcagcc

SEQ ID NO: 482923 - DNA, 58 bp, Homo sapiens; identical to SEQ ID NO: 465249
  chr16:88793218-88793276
  hypo
  uterine vs. pancreas_gallbladder,bladder_and_urothelial, colorectal,cervical,head_and_neck,upper_gi

SEQ ID NO: 482924 - DNA, 340 bp, Homo sapiens; identical to SEQ ID NO: 465250
  chr16:88793673-88794013
  hypo
  uterine vs. pancreas_gallbladder,bladder_and_urothelial, colorectal,cervical,head_and_neck,upper_gi

SEQ ID NO: 482925 - DNA, 395 bp, Homo sapiens; identical to SEQ ID NO: 465251
  chr16:88797394-88797789
  hypo
  uterine vs. cervical,anorectal,upper_gi,breast

SEQ ID NO: 482926 - DNA, 2 bp, Homo sapiens
  chr16:88797818-88797820
  hypo
  uterine vs. cervical,anorectal,upper_gi,breast
ac

SEQ ID NO: 482927 - DNA, 287 bp, Homo sapiens
  chr16:88802345-88802632
  hypo
  uterine vs. head_and_neck,bladder_and_urothelial
cgtgccaacacaaggttgtctgtttattcagtcaacaaacgctcactgagaagctactctgggctggctctgggtgggcagaaggggacagacagacacatctgccttcttggcgctgccactcccccgggcaagtggacattgaacaggacgacaaccctgatgggtctgcgcacccaggcacccccggatgtggtggtgcacactcaccatggcaccaaggtccagacaggggtagcgggtgtgctccagccccagctggcgcaggctgacggggcccagggtgg

SEQ ID NO: 482928 - DNA, 459 bp, Homo sapiens; identical to SEQ ID NO: 367066
  chr16:88802685-88803144
  hypo
  uterine vs. head_and_neck,bladder_and_urothelial

SEQ ID NO: 482929 - DNA, 582 bp, Homo sapiens
  chr16:88802685-88803267
  hypo
  uterine vs. head_and_neck,breast
gtcatcccatacagcaggatgcagggcgagcacagcatggccagttggtggcggctgcgcaccgtccagatgaggcaggcccagagcagcagtacgaaggtcagccagctgtggtaggtgatgctccatacctgcgcggcagagagggctgcacagctgcccagcgcaccccacccaggcgatgccccacacctgcgcggcagagggggctgcacagctgcccagcgcaccccacccaggcgatgccccacacctgcgcggcagagggggctgcacagctgcccagcgcaccccacccaggcgatgccccacacctgcgcggcagagggggccgcccaccccaacccccacagccgcctaccatcatggcaatgagcgcgcacacatagctctggtccatgatgaggtggcccaggctgtggagcggagacgcctccctgggctcagcccgcttgggccgcactgcaggtggggacagcggtcagcttcggcaggttgatctgcaggcctccccaccctgactatgccctaaaatctgggccctgggcaagcacacagcaggagagacaggcccccggtggg

SEQ ID NO: 482930 - DNA, 14 bp, Homo sapiens
  chr16:88966221-88966235
  hypo
  uterine vs. renal,lymphoid_neoplasm,thyroid
cgtggtccgtcctg

SEQ ID NO: 482931 - DNA, 4 bp, Homo sapiens
  chr16:88970438-88970442
  hypo
  uterine vs. anorectal
cgct

SEQ ID NO: 482932 - DNA, 64 bp, Homo sapiens; identical to SEQ ID NO: 381413
  chr16:88970534-88970598
  hypo
  uterine vs. anorectal

SEQ ID NO: 482933 - DNA, 79 bp, Homo sapiens; identical to SEQ ID NO: 454865
  chr16:89254530-89254609
  hypo
  uterine vs. renal,multiple_myeloma,non_cancer,thyroid, prostate

SEQ ID NO: 482934 - DNA, 144 bp, Homo sapiens; identical to SEQ ID NO: 355552
  chr16:89254764-89254908
  hypo
  uterine vs. renal,multiple_myeloma,non_cancer,thyroid, prostate

SEQ ID NO: 482935 - DNA, 401 bp, Homo sapiens; identical to SEQ ID NO: 460140
  chr16:89409913-89410314
  hypo
  uterine vs. lymphoid_neoplasm

SEQ ID NO: 482936 - DNA, 107 bp, Homo sapiens; identical to SEQ ID NO: 342793
  chr16:89442354-89442461
  hypo
  uterine vs. melanoma,bladder_and_urothelial, pancreas_gallbladder,colorectal,anorectal,upper_gi,cervical, head_and_neck,liver_bileduct,lymphoid_neoplasm

SEQ ID NO: 482937 - DNA, 494 bp, Homo sapiens; identical to SEQ ID NO: 342796
  chr16:89468462-89468956
  hypo
  uterine vs. pancreas_gallbladder

SEQ ID NO: 482938 - DNA, 172 bp, Homo sapiens
  chr16:89770184-89770356
  hypo
  uterine vs. upper_gi,melanoma,colorectal
cggactaacacaccctcagaacccagccactagagtgagaaggccacggccgtgtgcagagcttttggcctgcaacttcgacctgcgactcacattcacctgcagcctattcttgggacttttttggaaatagtttttccagacaaaaatcaagatgagtttgttctgggcc

SEQ ID NO: 482939 - DNA, 65 bp, Homo sapiens; identical to SEQ ID NO: 342820
  chr17:1244981-1245046
  hypo
  uterine vs. lymphoid_neoplasm

SEQ ID NO: 482940 - DNA, 194 bp, Homo sapiens; identical to SEQ ID NO: 342825
  chr17:1462644-1462838
  hypo
  uterine vs. bladder_and_urothelial,pancreas_gallbladder, liver_bileduct,upper_gi,colorectal

SEQ ID NO: 482941 - DNA, 34 bp, Homo sapiens; identical to SEQ ID NO: 345503
  chr17:4981985-4982019
  hypo
  uterine vs. breast,ovary,prostate,anorectal,sarcoma, cervical,bladder_and_urothelial,non_cancer,renal,head_and_neck, pancreas_gallbladder,lung,myeloid_neoplasm,colorectal, multiple_myeloma,thyroid

SEQ ID NO: 482942 - DNA, 439 bp, Homo sapiens; identical to SEQ ID NO: 342876
  chr17:8197565-8198004
  hypo
  uterine vs. head_and_neck,lung,upper_gi

SEQ ID NO: 482943 - DNA, 226 bp, Homo sapiens
  chr17:8731961-8732187
  hypo
  uterine vs. bladder_and_urothelial
cgggacacgccgggcagcatttccccatccccactgggccggcctgtcctccggtgcagccctgggggcccgtcccagctgccaggcatcaagaagtccaggggccatgcacgcttcttgatgccccctttgcgctgcagcccggctcgctccatctcagggctgccgggtgcaggcagctcatcagcccccgtgggaaggtcccgctcaatgccgctgtcagtgg

SEQ ID NO: 482944 - DNA, 3 bp, Homo sapiens
  chr17:8732216-8732219
  hypo
  uterine vs. bladder_and_urothelial
tcc

SEQ ID NO: 482945 - DNA, 675 bp, Homo sapiens; identical to SEQ ID NO: 472536
  chr17:16283956-16284631
  hypo
  uterine vs. upper_gi,liver_bileduct,lymphoid_neoplasm, breast,pancreas_gallbladder,lung,colorectal,renal,prostate, bladder_and_urothelial,myeloid_neoplasm,non_cancer, head_and_neck,multiple_myeloma

SEQ ID NO: 482946 - DNA, 389 bp, Homo sapiens; identical to SEQ ID NO: 472537
  chr17:16284242-16284631
  hypo
  uterine vs. liver_bileduct,lymphoid_neoplasm,upper_gi, breast,lung,bladder_and_urothelial,pancreas_gallbladder, prostate,colorectal,renal

SEQ ID NO: 482947 - DNA, 39 bp, Homo sapiens; identical to SEQ ID NO: 347411
  chr17:16285065-16285104
  hypo
  uterine vs. liver_bileduct,lymphoid_neoplasm,upper_gi, breast,lung,bladder_and_urothelial,pancreas_gallbladder, prostate,colorectal,renal

SEQ ID NO: 482948 - DNA, 121 bp, Homo sapiens; identical to SEQ ID NO: 342908
  chr17:17488209-17488330
  hypo
  uterine vs. upper_gi

SEQ ID NO: 482949 - DNA, 111 bp, Homo sapiens
  chr17:27411553-27411664
  hypo
  uterine vs. breast
cgtcaaatacaatttatgtccgggctcatgtgctattagttaacggggagccgaatcacgggggaacaaacaaacggagacagaacggcgggggatattaattgtgtgtga

SEQ ID NO: 482950 - DNA, 299 bp, Homo sapiens; identical to SEQ ID NO: 381588
  chr17:27411693-27411992
  hypo
  uterine vs. breast

SEQ ID NO: 482951 - DNA, 4 bp, Homo sapiens
  chr17:28299355-28299359
  hypo
  uterine vs. breast,melanoma
cgcg

SEQ ID NO: 482952 - DNA, 228 bp, Homo sapiens; identical to SEQ ID NO: 367217
  chr17:28299376-28299604
  hypo
  uterine vs. breast,melanoma

SEQ ID NO: 482953 - DNA, 31 bp, Homo sapiens
  chr17:29112371-29112402
  hypo
  uterine vs. liver_bileduct,lung,pancreas_gallbladder
cgtgatccaccgcgcccggcctctggctagc

SEQ ID NO: 482954 - DNA, 121 bp, Homo sapiens; identical to SEQ ID NO: 342948
  chr17:29773391-29773512
  hypo
  uterine vs. upper_gi,colorectal,bladder_and_urothelial

SEQ ID NO: 482955 - DNA, 100 bp, Homo sapiens; identical to SEQ ID NO: 342988
  chr17:41672281-41672381
  hypo
  uterine vs. pancreas_gallbladder

SEQ ID NO: 482956 - DNA, 85 bp, Homo sapiens; identical to SEQ ID NO: 482029
  chr17:42030245-42030330
  hypo
  uterine vs. cervical

SEQ ID NO: 482957 - DNA, 170 bp, Homo sapiens; identical to SEQ ID NO: 345520
  chr17:42092357-42092527
  hypo
  uterine vs. bladder_and_urothelial,lung, pancreas_gallbladder,upper_gi,liver_bileduct,colorectal, multiple_myeloma,non_cancer,renal,myeloid_neoplasm,prostate, melanoma,sarcoma,thyroid,head_and_neck,cervical,anorectal,
  CONT. FROM ABOVE: breast,lymphoid_neoplasm,ovary

SEQ ID NO: 482958 - DNA, 326 bp, Homo sapiens
  chr17:42097490-42097816
  hypo
  uterine vs. upper_gi
cgtcaccagggagtccggcgcattcataaccagcaatgtttgtaagcatctagattactggggagagaaatattatcccagatggtgaatggaattaatggccacccccaagtgtgtctccccgtccaagcaggtattgccacctgtaggattcgcatacctagagggccccccagggaacaggaagagttctcctataattgtatcgctgtaatgtgtaattgaagtaacaaaggtgctgtgttttgtttgggcaagggcaaaaatagactgtttggttaaaagaagtccaggttggatttcaagtgttatcccgggccaggcgc

SEQ ID NO: 482959 - DNA, 48 bp, Homo sapiens; identical to SEQ ID NO: 348820
  chr17:57297129-57297177
  hypo
  uterine vs. lymphoid_neoplasm

SEQ ID NO: 482960 - DNA, 112 bp, Homo sapiens; identical to SEQ ID NO: 454237
  chr17:61777761-61777873
  hypo
  uterine vs. cervical,anorectal,sarcoma,multiple_myeloma, non_cancer,thyroid

SEQ ID NO: 482961 - DNA, 76 bp, Homo sapiens; identical to SEQ ID NO: 345537
  chr17:61778423-61778499
  hypo
  uterine vs. cervical,anorectal,sarcoma,multiple_myeloma, non_cancer,thyroid

SEQ ID NO: 482962 - DNA, 29 bp, Homo sapiens
  chr17:66434420-66434449
  hypo
  uterine vs. colorectal
cctggccccagccttagaagaggccactc

SEQ ID NO: 482963 - DNA, 201 bp, Homo sapiens; identical to SEQ ID NO: 355689
  chr17:71201650-71201851
  hypo
  uterine vs. melanoma,lymphoid_neoplasm, bladder_and_urothelial,cervical,multiple_myeloma, myeloid_neoplasm,pancreas_gallbladder,sarcoma

SEQ ID NO: 482964 - DNA, 32 bp, Homo sapiens
  chr17:71202346-71202378
  hypo
  uterine vs. bladder_and_urothelial
cgttttcacgccacacctcaacagcaaccttc

SEQ ID NO: 482965 - DNA, 120 bp, Homo sapiens; identical to SEQ ID NO: 381727
  chr17:71202407-71202527
  hypo
  uterine vs. bladder_and_urothelial

SEQ ID NO: 482966 - DNA, 253 bp, Homo sapiens
  chr17:72277763-72278016
  hypo
  uterine vs. cervical
cggcactcaggatttttttttaatgcggatgcagcttctggacaaattcctaggatctccccaccaccccttgcttcctgccccaaccagattgagaacctggagctgtcctggcaggacctgtggagatagggaaggggccggtggggtccctcaccccacaccctccctctgccccccagcagccggcaccatggagattgtgtacgtgtacgtcaagaagcgcagcgagttcgggaagcagtgcaatttc

SEQ ID NO: 482967 - DNA, 61 bp, Homo sapiens; identical to SEQ ID NO: 217992
  chr17:72278143-72278204
  hypo
  uterine vs. cervical

SEQ ID NO: 482968 - DNA, 81 bp, Homo sapiens; identical to SEQ ID NO: 454240
  chr17:73584287-73584368
  hypo
  uterine vs. cervical

SEQ ID NO: 482969 - DNA, 170 bp, Homo sapiens; identical to SEQ ID NO: 352021
  chr17:73584951-73585121
  hypo
  uterine vs. cervical

SEQ ID NO: 482970 - DNA, 193 bp, Homo sapiens; identical to SEQ ID NO: 454901
  chr17:73615737-73615930
  hypo
  uterine vs. cervical

SEQ ID NO: 482971 - DNA, 109 bp, Homo sapiens; identical to SEQ ID NO: 348835
  chr17:73616587-73616696
  hypo
  uterine vs. cervical

SEQ ID NO: 482972 - DNA, 264 bp, Homo sapiens; identical to SEQ ID NO: 343127
  chr17:74387398-74387662
  hypo
  uterine vs. liver_bileduct

SEQ ID NO: 482973 - DNA, 1 bp, Homo sapiens
  chr17:77084727-77084728
  hypo
  uterine vs. head_and_neck,breast,cervical
c

SEQ ID NO: 482974 - DNA, 82 bp, Homo sapiens; identical to SEQ ID NO: 343262
  chr17:80600131-80600213
  hypo
  uterine vs. lung,head_and_neck

SEQ ID NO: 482975 - DNA, 188 bp, Homo sapiens; identical to SEQ ID NO: 323753
  chr17:81062393-81062581
  hypo
  uterine vs. cervical

SEQ ID NO: 482976 - DNA, 185 bp, Homo sapiens; identical to SEQ ID NO: 343306
  chr18:3580794-3580979
  hypo
  uterine vs. head_and_neck,pancreas_gallbladder,breast, colorectal,sarcoma,bladder_and_urothelial,lung,upper_gi, melanoma

SEQ ID NO: 482977 - DNA, 241 bp, Homo sapiens; identical to SEQ ID NO: 343307
  chr18:3581880-3582121
  hypo
  uterine vs. pancreas_gallbladder

SEQ ID NO: 482978 - DNA, 3 bp, Homo sapiens
  chr18:9708731-9708734
  hypo
  uterine vs. cervical
cgg

SEQ ID NO: 482979 - DNA, 3 bp, Homo sapiens
  chr18:9913003-9913006
  hypo
  uterine vs. renal
atc

SEQ ID NO: 482980 - DNA, 5 bp, Homo sapiens
  chr18:12375948-12375953
  hypo
cggcc

SEQ ID NO: 482981 - DNA, 1 bp, Homo sapiens
  chr18:12376072-12376073
  hypo
c

SEQ ID NO: 482982 - DNA, 5 bp, Homo sapiens
  chr18:13135171-13135176
  hypo
  uterine vs. colorectal,liver_bileduct,cervical, multiple_myeloma,lymphoid_neoplasm
cgagg

SEQ ID NO: 482983 - DNA, 110 bp, Homo sapiens; identical to SEQ ID NO: 355824
  chr18:13135194-13135304
  hypo
  uterine vs. colorectal,liver_bileduct,cervical, multiple_myeloma,lymphoid_neoplasm

SEQ ID NO: 482984 - DNA, 340 bp, Homo sapiens; identical to SEQ ID NO: 343354
  chr18:13442504-13442844
  hypo
  uterine vs. breast,colorectal

SEQ ID NO: 482985 - DNA, 311 bp, Homo sapiens; identical to SEQ ID NO: 458751
  chr18:20911034-20911345
  hypo
  uterine vs. melanoma

SEQ ID NO: 482986 - DNA, 291 bp, Homo sapiens; identical to SEQ ID NO: 452955
  chr18:32557542-32557833
  hypo
  uterine vs. upper_gi

SEQ ID NO: 482987 - DNA, 18 bp, Homo sapiens
  chr18:32557864-32557882
  hypo
  uterine vs. upper_gi
tctgaacctggggcgctc

SEQ ID NO: 482988 - DNA, 45 bp, Homo sapiens; identical to SEQ ID NO: 452954
  chr18:32557884-32557929
  hypo
  uterine vs. upper_gi

SEQ ID NO: 482989 - DNA, 412 bp, Homo sapiens; identical to SEQ ID NO: 466721
  chr18:35146241-35146653
  hypo
  uterine vs. lung,breast

SEQ ID NO: 482990 - DNA, 14 bp, Homo sapiens
  chr18:44337138-44337152
  hypo
  uterine vs. sarcoma,thyroid,myeloid_neoplasm,non_cancer
caggggctgggcgc

SEQ ID NO: 482991 - DNA, 52 bp, Homo sapiens; identical to SEQ ID NO: 456664
  chr18:46142611-46142663
  hypo
  uterine vs. liver_bileduct

SEQ ID NO: 482992 - DNA, 141 bp, Homo sapiens; identical to SEQ ID NO: 465321
  chr18:47285293-47285434
  hypo
  uterine vs. liver_bileduct

SEQ ID NO: 482993 - DNA, 172 bp, Homo sapiens; identical to SEQ ID NO: 355853
  chr18:56008826-56008998
  hypo
  uterine vs. upper_gi,anorectal

SEQ ID NO: 482994 - DNA, 128 bp, Homo sapiens; identical to SEQ ID NO: 465323
  chr18:72347372-72347500
  hypo
  uterine vs. cervical,anorectal

SEQ ID NO: 482995 - DNA, 74 bp, Homo sapiens; identical to SEQ ID NO: 355856
  chr18:72347576-72347650
  hypo
  uterine vs. cervical,anorectal

SEQ ID NO: 482996 - DNA, 874 bp, Homo sapiens; identical to SEQ ID NO: 343422
  chr18:74096607-74097481
  hypo
  uterine vs. liver_bileduct

SEQ ID NO: 482997 - DNA, 133 bp, Homo sapiens; identical to SEQ ID NO: 454945
  chr18:74113780-74113913
  hypo
  uterine vs. liver_bileduct,colorectal, pancreas_gallbladder,melanoma

SEQ ID NO: 482998 - DNA, 61 bp, Homo sapiens; identical to SEQ ID NO: 454946
  chr18:74113942-74114003
  hypo
  uterine vs. liver_bileduct,colorectal, pancreas_gallbladder,melanoma

SEQ ID NO: 482999 - DNA, 168 bp, Homo sapiens; identical to SEQ ID NO: 343425
  chr18:74134219-74134387
  hypo
  uterine vs. liver_bileduct

SEQ ID NO: 483000 - DNA, 869 bp, Homo sapiens
  chr18:74153251-74154120
  hypo
  uterine vs. liver_bileduct,lung
cggccaggccagagcccggggagtcagcagcggcacaggcggagccagggctgctgggctgggaggccgagtcaccctcactgagtgatccgcagcgggcccgcgccgccctgtccccgtcactgtccctctcgcggcgcgcgcggcgatgcacgcgtgagtgcagcaccatctgatgataggtgcggaagatcttgccgcactcgaagcactcggaggacttgccctggccggtggtggctgcggccctgcggttggggcgcgcggccgagcggggatcgaggtggccggcgggcgcggggtccccaggcccgctcgcgcgcttccgcgggggcccctgcgcggctggtgcatcctgctcacgcttgcgcttctcctggctcaccaggacgtactcgcgcctgtccttgtcgaaggccacgtccccggccagcgcctcgtcccaggccccgtacttgaggtactcggccggctcggccaccttaccccgcgtggccagctgccaggcctggtagctgttgaccgggtccagctcagccacccgccgtccggcctgcgtgccagggcacgagtcgccggccgccgacggcctcaggttcaggcactggaggaagaactgcttggtgtccgagggcccctccgccccctcctcggccggggcgcgcgtgcggctggcctcgactctgcggtggatggcattgtgggcgttcaagctgtccaggtttgtaaacaggttcccgcacttggcgcagacctcgtagaggctcaggccggcgacgatcacctcctcctggaccacgttgttgatggtggcgatggggtccagctcactcttgggcctgttcttgctgcccgtcttggggccgtgc

SEQ ID NO: 483001 - DNA, 998 bp, Homo sapiens
  chr18:74153647-74154645
  hypo
  uterine vs. liver_bileduct,lung,colorectal
cgcgcctgtccttgtcgaaggccacgtccccggccagcgcctcgtcccaggccccgtacttgaggtactcggccggctcggccaccttaccccgcgtggccagctgccaggcctggtagctgttgaccgggtccagctcagccacccgccgtccggcctgcgtgccagggcacgagtcgccggccgccgacggcctcaggttcaggcactggaggaagaactgcttggtgtccgagggcccctccgccccctcctcggccggggcgcgcgtgcggctggcctcgactctgcggtggatggcattgtgggcgttcaagctgtccaggtttgtaaacaggttcccgcacttggcgcagacctcgtagaggctcaggccggcgacgatcacctcctcctggaccacgttgttgatggtggcgatggggtccagctcactcttgggcctgttcttgctgcccgtcttggggccgtgcgccttcatgtggttcttgaggaaccagggctccttgaacctacggccgcagatgtggcagccgtggtcgaaggagccccggtgcttcttcatgtgcgccttcaggaaccaggtctggctgaaggcctggccacacacctcgcacgggaactccccggggctcagctcgggcttgccgttctccacgcaggcctcgccgctgccgggcccctgcgcggtgatgtggtccctctcgatgtggctcagcagcgactcctcccgcagcgtcgcgtagctgcacagcctgcacttgaacggcttgtgcgcctggtgcacgtgcagctccaggtccttcttacgctcgaactggctcttgcagaaggagcactggaccgctgccttggcctcccccggggcgcatgcggacccctctgcccccttcttgctgctccgcagcaggactctgccgctgtcggcctgcgaggccccgttcaggaccctggcgccgtcggcctgcgaggccccgttcagcagccggttgcaggcc

SEQ ID NO: 483002 - DNA, 876 bp, Homo sapiens
  chr18:74154162-74155038
  hypo
  uterine vs. liver_bileduct
cggccgcagatgtggcagccgtggtcgaaggagccccggtgcttcttcatgtgcgccttcaggaaccaggtctggctgaaggcctggccacacacctcgcacgggaactccccggggctcagctcgggcttgccgttctccacgcaggcctcgccgctgccgggcccctgcgcggtgatgtggtccctctcgatgtggctcagcagcgactcctcccgcagcgtcgcgtagctgcacagcctgcacttgaacggcttgtgcgcctggtgcacgtgcagctccaggtccttcttacgctcgaactggctcttgcagaaggagcactggaccgctgccttggcctcccccggggcgcatgcggacccctctgcccccttcttgctgctccgcagcaggactctgccgctgtcggcctgcgaggccccgttcaggaccctggcgccgtcggcctgcgaggccccgttcagcagccggttgcaggccgaggcgctcttggtggggctggcgcaggcgtccaggccctcggaggcgcgcatctcacccagcggcgcctcgcccgcctccggctcgtgtccctgaatcagagtccccgtgcggtggctccggatgtgaatcttcaggttgcccttctgggaagcccggtggtcgcagtagggacacttgtagggcttctcgcccgtgtgcttgcgcatgtgctgcgaaagcgagctctggaaggggaagctcttgccgcagatgcagcaggtgtggcaggtagccttgtccccatccacctcgtggccccggccggccctggtggggctggggcctcgcctcagctccatctcggcctctctgttgcgatccatccgaaggacgggcgcggccggtggtggc

SEQ ID NO: 483003 - DNA, 246 bp, Homo sapiens; identical to SEQ ID NO: 470311
  chr18:74325503-74325749
  hypo
  uterine vs. upper_gi

SEQ ID NO: 483004 - DNA, 173 bp, Homo sapiens; identical to SEQ ID NO: 355871
  chr18:74325938-74326111
  hypo
  uterine vs. upper_gi

SEQ ID NO: 483005 - DNA, 101 bp, Homo sapiens; identical to SEQ ID NO: 382099
  chr18:74419743-74419844
  hypo

SEQ ID NO: 483006 - DNA, 56 bp, Homo sapiens; identical to SEQ ID NO: 463494
  chr18:76653387-76653443
  hypo
  uterine vs. pancreas_gallbladder,lymphoid_neoplasm, thyroid,colorectal,head_and_neck

SEQ ID NO: 483007 - DNA, 150 bp, Homo sapiens; identical to SEQ ID NO: 471856
  chr18:77270851-77271001
  hypo
  uterine vs. head_and_neck

SEQ ID NO: 483008 - DNA, 338 bp, Homo sapiens; identical to SEQ ID NO: 367670
  chr18:77271089-77271427
  hypo
  uterine vs. head_and_neck

SEQ ID NO: 483009 - DNA, 161 bp, Homo sapiens; identical to SEQ ID NO: 465328
  chr18:77508739-77508900
  hypo
  uterine vs. melanoma,liver_bileduct,renal,cervical, breast,upper_gi,pancreas_gallbladder,bladder_and_urothelial, lymphoid_neoplasm,prostate,colorectal,anorectal

SEQ ID NO: 483010 - DNA, 399 bp, Homo sapiens; identical to SEQ ID NO: 465329
  chr18:77508946-77509345
  hypo
  uterine vs. melanoma,liver_bileduct,renal,cervical, breast,upper_gi,pancreas_gallbladder,bladder_and_urothelial, lymphoid_neoplasm,prostate,colorectal,anorectal

SEQ ID NO: 483011 - DNA, 315 bp, Homo sapiens; identical to SEQ ID NO: 465330
  chr18:77509030-77509345
  hypo
  uterine vs. upper_gi,colorectal,cervical,breast, liver_bileduct,renal,pancreas_gallbladder,lymphoid_neoplasm, prostate,melanoma,bladder_and_urothelial,non_cancer

SEQ ID NO: 483012 - DNA, 116 bp, Homo sapiens; identical to SEQ ID NO: 346189
  chr18:77509679-77509795
  hypo
  uterine vs. upper_gi,colorectal,cervical,breast, liver_bileduct,renal,pancreas_gallbladder,lymphoid_neoplasm, prostate,melanoma,bladder_and_urothelial,non_cancer

SEQ ID NO: 483013 - DNA, 268 bp, Homo sapiens; identical to SEQ ID NO: 343497
  chr18:77535504-77535772
  hypo

SEQ ID NO: 483014 - DNA, 266 bp, Homo sapiens; identical to SEQ ID NO: 453773
  chr18:77542640-77542906
  hypo
  uterine vs. melanoma,lymphoid_neoplasm,renal

SEQ ID NO: 483015 - DNA, 271 bp, Homo sapiens; identical to SEQ ID NO: 453774
  chr18:77542951-77543222
  hypo
  uterine vs. melanoma,lymphoid_neoplasm,renal

SEQ ID NO: 483016 - DNA, 2 bp, Homo sapiens
  chr18:77543376-77543378
  hypo
  uterine vs. melanoma,lymphoid_neoplasm,renal
ac

SEQ ID NO: 483017 - DNA, 136 bp, Homo sapiens
  chr18:77609451-77609587
  hypo
  uterine vs. melanoma,renal,pancreas_gallbladder,breast, head_and_neck,lymphoid_neoplasm,sarcoma
cgtccgacctcatccggggcaaggtcgtccgcgtgcaggagccgcatctggacaggccgcacctgccttccctccccgccttgctctgcgtcagcctaggagcctcctgtcctggccgcgggttacaccaagcgcg

SEQ ID NO: 483018 - DNA, 474 bp, Homo sapiens; identical to SEQ ID NO: 348906
  chr18:77609678-77610152
  hypo
  uterine vs. melanoma,renal,pancreas_gallbladder,breast, head_and_neck,lymphoid_neoplasm,sarcoma

SEQ ID NO: 483019 - DNA, 363 bp, Homo sapiens; identical to SEQ ID NO: 473042
  chr18:77627972-77628335
  hypo
  uterine vs. head_and_neck,cervical,anorectal,colorectal

SEQ ID NO: 483020 - DNA, 122 bp, Homo sapiens; identical to SEQ ID NO: 355903
  chr18:77628470-77628592
  hypo
  uterine vs. head_and_neck,cervical,anorectal,colorectal

SEQ ID NO: 483021 - DNA, 154 bp, Homo sapiens; identical to SEQ ID NO: 367699
  chr19:379979-380133
  hypo
  uterine vs. pancreas_gallbladder,cervical

SEQ ID NO: 483022 - DNA, 54 bp, Homo sapiens; identical to SEQ ID NO: 355909
  chr19:403809-403863
  hypo
  uterine vs. renal,lymphoid_neoplasm

SEQ ID NO: 483023 - DNA, 53 bp, Homo sapiens; identical to SEQ ID NO: 355910
  chr19:407832-407885
  hypo
  uterine vs. lymphoid_neoplasm,cervical,anorectal,renal

SEQ ID NO: 483024 - DNA, 311 bp, Homo sapiens; identical to SEQ ID NO: 367701
  chr19:407832-408143
  hypo
  uterine vs. lymphoid_neoplasm,renal,cervical

SEQ ID NO: 483025 - DNA, 805 bp, Homo sapiens; identical to SEQ ID NO: 367702
  chr19:418255-419060
  hypo
  uterine vs. colorectal

SEQ ID NO: 483026 - DNA, 99 bp, Homo sapiens; identical to SEQ ID NO: 454948
  chr19:549193-549292
  hypo
  uterine vs. renal,cervical

SEQ ID NO: 483027 - DNA, 2 bp, Homo sapiens
  chr19:550028-550030
  hypo
  uterine vs. renal,cervical
ac

SEQ ID NO: 483028 - DNA, 96 bp, Homo sapiens
  chr19:557942-558038
  hypo
  uterine vs. breast
cgtgagccaccacgcctggccccttattgaacttgatggtttctccttcgtatctcagaagtcacaagctggaggatttaggtttgaagaatcacg

SEQ ID NO: 483029 - DNA, 406 bp, Homo sapiens; identical to SEQ ID NO: 454268
  chr19:603411-603817
  hypo
  uterine vs. renal

SEQ ID NO: 483030 - DNA, 159 bp, Homo sapiens; identical to SEQ ID NO: 352129
  chr19:603846-604005
  hypo
  uterine vs. renal

SEQ ID NO: 483031 - DNA, 22 bp, Homo sapiens
  chr19:629526-629548
  hypo
  uterine vs. breast
cggctgcactcacctgccgcgc

SEQ ID NO: 483032 - DNA, 216 bp, Homo sapiens; identical to SEQ ID NO: 367712
  chr19:629609-629825
  hypo
  uterine vs. breast

SEQ ID NO: 483033 - DNA, 159 bp, Homo sapiens; identical to SEQ ID NO: 453776
  chr19:883424-883583
  hypo
  uterine vs. melanoma,sarcoma

SEQ ID NO: 483034 - DNA, 45 bp, Homo sapiens; identical to SEQ ID NO: 453777
  chr19:884311-884356
  hypo
  uterine vs. melanoma,sarcoma

SEQ ID NO: 483035 - DNA, 229 bp, Homo sapiens; identical to SEQ ID NO: 456692
  chr19:1004547-1004776
  hypo
  uterine vs. renal,lymphoid_neoplasm,non_cancer,thyroid, multiple_myeloma,prostate

SEQ ID NO: 483036 - DNA, 279 bp, Homo sapiens; identical to SEQ ID NO: 218770
  chr19:1005441-1005720
  hypo
  uterine vs. renal,thyroid,non_cancer,lymphoid_neoplasm, multiple_myeloma,prostate

SEQ ID NO: 483037 - DNA, 743 bp, Homo sapiens
  chr19:1079725-1080468
  hypo
  uterine vs. liver_bileduct
cgcacctgcgtggccgacgcgaagacgcagaagcaggagctggaggataccaaggtgacggcgctgcggcagatccaggaggtcatccggcagagcgaccaaaccatcaagtcggtgcgtggggtgctccggccgcccgggcggggatggtggaccgggcggcctcctcctgacccctccgctctccggtgccgcccgcaggccacgatctcctactaccagatgatgcatatgcagacggcgccgctgcccgtgcacttccagatgctgtgtgagagcagcaagctgtatgacccaggccagcagtacgcctcccacgtgcgccagctgcagcgggaccaggagcccgatgtgcactacgactttgagccccacgtctccgccaacgcctggtaccgccacccagctgccctgtccccggcgcacaaggccctgcctgggagccgggcttccctctgtcgggggcatgaagatgaagctgtcttgccccccatcacctcccctccttttcccggtttcttccactaggtcccccgtcatgcgtgcccggaagagcagcttcaacgtgagtgatgtggcgcggccggaggctgccgggagccccccagaagaaggcgggtgcactgagggcacacctgccaaggaccacaggggtgagtgtccggcggggcccaggggcggacgctggctccctgcgacccaccctggcccttcaccagagacgcctctttctccagccgggc

SEQ ID NO: 483038 - DNA, 678 bp, Homo sapiens; identical to SEQ ID NO: 454965
  chr19:1080033-1080711
  hypo
  uterine vs. liver_bileduct

SEQ ID NO: 483039 - DNA, 17 bp, Homo sapiens
  chr19:1080746-1080763
  hypo
  uterine vs. liver_bileduct
acccagacggtggagcc

SEQ ID NO: 483040 - DNA, 65 bp, Homo sapiens
  chr19:1308081-1308146
  hypo
  uterine vs. anorectal
aaaccaccgccagcggctccccgtctatttgtctgtgcacattcctgggctcagacggtggcttc

SEQ ID NO: 483041 - DNA, 576 bp, Homo sapiens; identical to SEQ ID NO: 343565
  chr19:1333769-1334345
  hypo
  uterine vs. breast

SEQ ID NO: 483042 - DNA, 31 bp, Homo sapiens
  chr19:1494971-1495002
  hypo
  uterine vs. cervical
cgcgcccggctgcaaacacttcactgggcag

SEQ ID NO: 483043 - DNA, 164 bp, Homo sapiens; identical to SEQ ID NO: 367757
  chr19:1495400-1495564
  hypo
  uterine vs. cervical

SEQ ID NO: 483044 - DNA, 241 bp, Homo sapiens; identical to SEQ ID NO: 355940
  chr19:1506026-1506267
  hypo
  uterine vs. liver_bileduct,cervical,pancreas_gallbladder

SEQ ID NO: 483045 - DNA, 233 bp, Homo sapiens; identical to SEQ ID NO: 453785
  chr19:1978023-1978256
  hypo
  uterine vs. liver_bileduct,lymphoid_neoplasm,melanoma, renal

SEQ ID NO: 483046 - DNA, 116 bp, Homo sapiens; identical to SEQ ID NO: 345560
  chr19:1979018-1979134
  hypo
  uterine vs. liver_bileduct,melanoma,lymphoid_neoplasm, renal

SEQ ID NO: 483047 - DNA, 181 bp, Homo sapiens; identical to SEQ ID NO: 367778
  chr19:1993286-1993467
  hypo
  uterine vs. sarcoma

SEQ ID NO: 483048 - DNA, 113 bp, Homo sapiens
  chr19:2573883-2573996
  hypo
  uterine vs. melanoma
cgtggtcatatgcgaacgggtgaattaaattctttctggaagaggctggaaaggcactgcatgaatgggacataccgtgggtgccacggaccagctgctgcgaggtacggccg

SEQ ID NO: 483049 - DNA, 153 bp, Homo sapiens; identical to SEQ ID NO: 367793
  chr19:2574044-2574197
  hypo
  uterine vs. melanoma

SEQ ID NO: 483050 - DNA, 337 bp, Homo sapiens
  chr19:5896616-5896953
  hypo
  uterine vs. liver_bileduct,sarcoma, bladder_and_urothelial,melanoma,renal
cgagacgggcacagcaggagcctcttgggcgctcactgccagtgtctggatggagagagatgccacgagtcggctgctcgctgtgcatggcagcctcctggccccagtcctggagctgttctcctgggcctccccaccctacatgtattcctgataaaggaacaccccactttctccggatggccagcactgtggacacgggctggggagtcagagagaagaggcagccgtcaaatgtgctctgagagctggggctgtgccaggagagggcccagccatgcccagcccagcgtgctcacctgcagtgaacgtgtattgtccaaccttagccactcct

SEQ ID NO: 483051 - DNA, 259 bp, Homo sapiens; identical to SEQ ID NO: 456711
  chr19:5897319-5897578
  hypo
  uterine vs. upper_gi,liver_bileduct,pancreas_gallbladder, colorectal

SEQ ID NO: 483052 - DNA, 292 bp, Homo sapiens; identical to SEQ ID NO: 456712
  chr19:5915130-5915422
  hypo
  uterine vs. lymphoid_neoplasm,melanoma

SEQ ID NO: 483053 - DNA, 406 bp, Homo sapiens; identical to SEQ ID NO: 456713
  chr19:5915520-5915926
  hypo
  uterine vs. lymphoid_neoplasm,melanoma

SEQ ID NO: 483054 - DNA, 18 bp, Homo sapiens
  chr19:5915969-5915987
  hypo
  uterine vs. lymphoid_neoplasm,melanoma
ggggtgggggtaaagtgc

SEQ ID NO: 483055 - DNA, 365 bp, Homo sapiens; identical to SEQ ID NO: 456715
  chr19:5915561-5915926
  hypo
  uterine vs. melanoma

SEQ ID NO: 483056 - DNA, 324 bp, Homo sapiens; identical to SEQ ID NO: 367859
  chr19:5915969-5916293
  hypo
  uterine vs. melanoma

SEQ ID NO: 483057 - DNA, 323 bp, Homo sapiens; identical to SEQ ID NO: 361399
  chr19:6590881-6591204
  hypo
  uterine vs. multiple_myeloma,renal,non_cancer, lymphoid_neoplasm

SEQ ID NO: 483058 - DNA, 131 bp, Homo sapiens; identical to SEQ ID NO: 343715
  chr19:8526882-8527013
  hypo
  uterine vs. head_and_neck,bladder_and_urothelial,sarcoma, anorectal,pancreas_gallbladder,liver_bileduct,cervical, colorectal,melanoma,prostate,lymphoid_neoplasm,lung,non_cancer, myeloid_neoplasm,renal,thyroid

SEQ ID NO: 483059 - DNA, 62 bp, Homo sapiens; identical to SEQ ID NO: 343716
  chr19:8535026-8535088
  hypo
  uterine vs. lung,cervical,sarcoma,lymphoid_neoplasm, melanoma

SEQ ID NO: 483060 - DNA, 212 bp, Homo sapiens; identical to SEQ ID NO: 455816
  chr19:10197461-10197673
  hypo
  uterine vs. cervical,bladder_and_urothelial

SEQ ID NO: 483061 - DNA, 116 bp, Homo sapiens; identical to SEQ ID NO: 452980
  chr19:10691764-10691880
  hypo
  uterine vs. melanoma,lymphoid_neoplasm

SEQ ID NO: 483062 - DNA, 177 bp, Homo sapiens; identical to SEQ ID NO: 356025
  chr19:11003087-11003264
  hypo
  uterine vs. lymphoid_neoplasm,renal,prostate, liver_bileduct,melanoma

SEQ ID NO: 483063 - DNA, 261 bp, Homo sapiens; identical to SEQ ID NO: 335980
  chr19:12807005-12807266
  hypo
  uterine vs. lung

SEQ ID NO: 483064 - DNA, 35 bp, Homo sapiens; identical to SEQ ID NO: 470352
  chr19:13201116-13201151
  hypo
  uterine vs. cervical,pancreas_gallbladder

SEQ ID NO: 483065 - DNA, 190 bp, Homo sapiens; identical to SEQ ID NO: 455820
  chr19:13213427-13213617
  hypo
  uterine vs. cervical,pancreas_gallbladder, bladder_and_urothelial,upper_gi,colorectal,anorectal

SEQ ID NO: 483066 - DNA, 112 bp, Homo sapiens; identical to SEQ ID NO: 345573
  chr19:13213834-13213946
  hypo
  uterine vs. cervical,pancreas_gallbladder, bladder_and_urothelial,upper_gi,colorectal,anorectal

SEQ ID NO: 483067 - DNA, 106 bp, Homo sapiens; identical to SEQ ID NO: 459516
  chr19:17392397-17392503
  hypo
  uterine vs. anorectal,multiple_myeloma, bladder_and_urothelial

SEQ ID NO: 483068 - DNA, 149 bp, Homo sapiens; identical to SEQ ID NO: 473091
  chr19:17757928-17758077
  hypo
  uterine vs. pancreas_gallbladder,breast

SEQ ID NO: 483069 - DNA, 96 bp, Homo sapiens; identical to SEQ ID NO: 367994
  chr19:17758133-17758229
  hypo
  uterine vs. pancreas_gallbladder,breast

SEQ ID NO: 483070 - DNA, 90 bp, Homo sapiens; identical to SEQ ID NO: 454993
  chr19:18092401-18092491
  hypo
  uterine vs. renal,prostate

SEQ ID NO: 483071 - DNA, 62 bp, Homo sapiens; identical to SEQ ID NO: 367998
  chr19:18092885-18092947
  hypo
  uterine vs. renal,prostate

SEQ ID NO: 483072 - DNA, 3 bp, Homo sapiens
  chr19:18807947-18807950
  hypo
  uterine vs. melanoma
cga

SEQ ID NO: 483073 - DNA, 160 bp, Homo sapiens; identical to SEQ ID NO: 356079
  chr19:18808024-18808184
  hypo
  uterine vs. melanoma

SEQ ID NO: 483074 - DNA, 25 bp, Homo sapiens
  chr19:33996103-33996128
  hypo
  uterine vs. liver_bileduct,cervical,head_and_neck
cgcggcccggcctgccttcagctac

SEQ ID NO: 483075 - DNA, 248 bp, Homo sapiens; identical to SEQ ID NO: 356116
  chr19:33996157-33996405
  hypo
  uterine vs. liver_bileduct,cervical,head_and_neck

SEQ ID NO: 483076 - DNA, 39 bp, Homo sapiens; identical to SEQ ID NO: 482114
  chr19:35168869-35168908
  hypo
  uterine vs. lung

SEQ ID NO: 483077 - DNA, 97 bp, Homo sapiens; identical to SEQ ID NO: 482115
  chr19:35168992-35169089
  hypo
  uterine vs. lung

SEQ ID NO: 483078 - DNA, 264 bp, Homo sapiens; identical to SEQ ID NO: 457750
  chr19:38719956-38720220
  hypo
  uterine vs. ovary

SEQ ID NO: 483079 - DNA, 187 bp, Homo sapiens; identical to SEQ ID NO: 352306
  chr19:38720439-38720626
  hypo
  uterine vs. ovary

SEQ ID NO: 483080 - DNA, 86 bp, Homo sapiens; identical to SEQ ID NO: 455009
  chr19:39289891-39289977
  hypo
  uterine vs. colorectal,lymphoid_neoplasm

SEQ ID NO: 483081 - DNA, 369 bp, Homo sapiens; identical to SEQ ID NO: 343965
  chr19:39435437-39435806
  hypo
  uterine vs. liver_bileduct,melanoma

SEQ ID NO: 483082 - DNA, 109 bp, Homo sapiens; identical to SEQ ID NO: 343976
  chr19:40474764-40474873
  hypo
  uterine vs. liver_bileduct,bladder_and_urothelial,breast, upper_gi,lymphoid_neoplasm,melanoma,pancreas_gallbladder,lung, sarcoma,renal

SEQ ID NO: 483083 - DNA, 75 bp, Homo sapiens; identical to SEQ ID NO: 356167
  chr19:45810267-45810342
  hypo
  uterine vs. melanoma,renal,lymphoid_neoplasm

SEQ ID NO: 483084 - DNA, 41 bp, Homo sapiens; identical to SEQ ID NO: 479856
  chr19:46307556-46307597
  hypo
  uterine vs. sarcoma

SEQ ID NO: 483085 - DNA, 39 bp, Homo sapiens; identical to SEQ ID NO: 356169
  chr19:46308096-46308135
  hypo
  uterine vs. sarcoma

SEQ ID NO: 483086 - DNA, 32 bp, Homo sapiens; identical to SEQ ID NO: 455019
  chr19:47116867-47116899
  hypo
  uterine vs. pancreas_gallbladder

SEQ ID NO: 483087 - DNA, 112 bp, Homo sapiens; identical to SEQ ID NO: 344031
  chr19:47646754-47646866
  hypo
  uterine vs. anorectal

SEQ ID NO: 483088 - DNA, 4 bp, Homo sapiens
  chr19:49997367-49997371
  hypo
cgtg

SEQ ID NO: 483089 - DNA, 144 bp, Homo sapiens; identical to SEQ ID NO: 382767
  chr19:49997398-49997542
  hypo

SEQ ID NO: 483090 - DNA, 78 bp, Homo sapiens; identical to SEQ ID NO: 356193
  chr19:50320125-50320203
  hypo
  uterine vs. melanoma

SEQ ID NO: 483091 - DNA, 67 bp, Homo sapiens; identical to SEQ ID NO: 348994
  chr19:50365162-50365229
  hypo
  uterine vs. melanoma

SEQ ID NO: 483092 - DNA, 233 bp, Homo sapiens; identical to SEQ ID NO: 368219
  chr19:53507269-53507502
  hypo
  uterine vs. bladder_and_urothelial

SEQ ID NO: 483093 - DNA, 108 bp, Homo sapiens; identical to SEQ ID NO: 344106
  chr19:55976235-55976343
  hypo
  uterine vs. liver_bileduct

SEQ ID NO: 483094 - DNA, 146 bp, Homo sapiens; identical to SEQ ID NO: 455031
  chr19:56688223-56688369
  hypo
  uterine vs. head_and_neck

SEQ ID NO: 483095 - DNA, 13 bp, Homo sapiens
  chr19:56688479-56688492
  hypo
  uterine vs. head_and_neck
ggctcctccctcc

SEQ ID NO: 483096 - DNA, 1 bp, Homo sapiens
  chr19:58952140-58952141
  hypo
  uterine vs. sarcoma,thyroid,prostate,myeloid_neoplasm
c

SEQ ID NO: 483097 - DNA, 54 bp, Homo sapiens; identical to SEQ ID NO: 456800
  chr19:58964127-58964181
  hypo
  uterine vs. melanoma,liver_bileduct,renal

SEQ ID NO: 483098 - DNA, 221 bp, Homo sapiens; identical to SEQ ID NO: 362812
  chr2:9481652-9481873
  hypo
  uterine vs. bladder_and_urothelial

SEQ ID NO: 483099 - DNA, 614 bp, Homo sapiens; identical to SEQ ID NO: 337537
  chr2:10334473-10335087
  hypo
  uterine vs. cervical

SEQ ID NO: 483100 - DNA, 178 bp, Homo sapiens; identical to SEQ ID NO: 345000
  chr2:10588876-10589054
  hypo
  uterine vs. liver_bileduct

SEQ ID NO: 483101 - DNA, 117 bp, Homo sapiens; identical to SEQ ID NO: 455869
  chr2:10589056-10589173
  hypo
  uterine vs. liver_bileduct

SEQ ID NO: 483102 - DNA, 225 bp, Homo sapiens; identical to SEQ ID NO: 337586
  chr2:28065720-28065945
  hypo
  uterine vs. liver_bileduct

SEQ ID NO: 483103 - DNA, 52 bp, Homo sapiens; identical to SEQ ID NO: 462675
  chr2:29033285-29033337
  hypo
  uterine vs. sarcoma,anorectal,thyroid,breast

SEQ ID NO: 483104 - DNA, 9 bp, Homo sapiens
  chr2:40679688-40679697
  hypo
  uterine vs. ovary
cgcctaccc

SEQ ID NO: 483105 - DNA, 163 bp, Homo sapiens; identical to SEQ ID NO: 337636
  chr2:68486689-68486852
  hypo
  uterine vs. pancreas_gallbladder

SEQ ID NO: 483106 - DNA, 61 bp, Homo sapiens; identical to SEQ ID NO: 347902
  chr2:85280346-85280407
  hypo
  uterine vs. liver_bileduct,melanoma,head_and_neck, colorectal,cervical,sarcoma,anorectal,renal, bladder_and_urothelial,lung,lymphoid_neoplasm, pancreas_gallbladder,prostate,upper_gi,multiple_myeloma

SEQ ID NO: 483107 - DNA, 87 bp, Homo sapiens; identical to SEQ ID NO: 455075
  chr2:88591077-88591164
  hypo
  uterine vs. lymphoid_neoplasm,sarcoma, pancreas_gallbladder,multiple_myeloma

SEQ ID NO: 483108 - DNA, 316 bp, Homo sapiens; identical to SEQ ID NO: 353140
  chr2:98377004-98377320
  hypo
  uterine vs. breast,lung,colorectal,head_and_neck, melanoma,liver_bileduct

SEQ ID NO: 483109 - DNA, 86 bp, Homo sapiens; identical to SEQ ID NO: 477590
  chr2:106730126-106730212
  hypo
  uterine vs. sarcoma,breast,cervical

SEQ ID NO: 483110 - DNA, 160 bp, Homo sapiens; identical to SEQ ID NO: 353150
  chr2:106730256-106730416
  hypo
  uterine vs. sarcoma,breast,cervical

SEQ ID NO: 483111 - DNA, 209 bp, Homo sapiens; identical to SEQ ID NO: 455076
  chr2:113103038-113103247
  hypo
  uterine vs. cervical,melanoma

SEQ ID NO: 483112 - DNA, 89 bp, Homo sapiens; identical to SEQ ID NO: 353164
  chr2:113103431-113103520
  hypo
  uterine vs. cervical,melanoma

SEQ ID NO: 483113 - DNA, 6 bp, Homo sapiens
  chr2:127535179-127535185
  hypo
  uterine vs. melanoma,breast,sarcoma
aagggc

SEQ ID NO: 483114 - DNA, 154 bp, Homo sapiens; identical to SEQ ID NO: 337763
  chr2:130512142-130512296
  hypo
  uterine vs. lymphoid_neoplasm,renal,sarcoma

SEQ ID NO: 483115 - DNA, 69 bp, Homo sapiens; identical to SEQ ID NO: 357317
  chr2:139538166-139538235
  hypo
  uterine vs. bladder_and_urothelial

SEQ ID NO: 483116 - DNA, 83 bp, Homo sapiens; identical to SEQ ID NO: 473148
  chr2:170282893-170282976
  hypo
  uterine vs. cervical,sarcoma

SEQ ID NO: 483117 - DNA, 18 bp, Homo sapiens
  chr2:170283080-170283098
  hypo
  uterine vs. cervical,sarcoma
ttccccagccctctcacc

SEQ ID NO: 483118 - DNA, 133 bp, Homo sapiens; identical to SEQ ID NO: 337806
  chr2:171730981-171731114
  hypo
  uterine vs. liver_bileduct,bladder_and_urothelial

SEQ ID NO: 483119 - DNA, 31 bp, Homo sapiens
  chr2:190368120-190368151
  hypo
  uterine vs. head_and_neck
cgccgggattacaggcgtgagccaccacgcc

SEQ ID NO: 483120 - DNA, 64 bp, Homo sapiens; identical to SEQ ID NO: 337829
  chr2:196411561-196411625
  hypo
  uterine vs. breast,pancreas_gallbladder

SEQ ID NO: 483121 - DNA, 237 bp, Homo sapiens; identical to SEQ ID NO: 459601
  chr2:225906168-225906405
  hypo

SEQ ID NO: 483122 - DNA, 77 bp, Homo sapiens; identical to SEQ ID NO: 454345
  chr2:225906328-225906405
  hypo

SEQ ID NO: 483123 - DNA, 337 bp, Homo sapiens; identical to SEQ ID NO: 337887
  chr2:227841945-227842282
  hypo
  uterine vs. liver_bileduct,lymphoid_neoplasm

SEQ ID NO: 483124 - DNA, 131 bp, Homo sapiens; identical to SEQ ID NO: 337890
  chr2:231676894-231677025
  hypo
  uterine vs. colorectal,liver_bileduct,melanoma,sarcoma

SEQ ID NO: 483125 - DNA, 121 bp, Homo sapiens; identical to SEQ ID NO: 473157
  chr2:240167455-240167576
  hypo
  uterine vs. melanoma

SEQ ID NO: 483126 - DNA, 310 bp, Homo sapiens; identical to SEQ ID NO: 353257
  chr2:240167605-240167915
  hypo
  uterine vs. melanoma

SEQ ID NO: 483127 - DNA, 80 bp, Homo sapiens; identical to SEQ ID NO: 337957
  chr2:240319796-240319876
  hypo
  uterine vs. liver_bileduct,pancreas_gallbladder

SEQ ID NO: 483128 - DNA, 26 bp, Homo sapiens
  chr2:240658158-240658184
  hypo
  uterine vs. anorectal,cervical
cgtctccttggtgaggtcgcgtggag

SEQ ID NO: 483129 - DNA, 209 bp, Homo sapiens; identical to SEQ ID NO: 353265
  chr2:241157300-241157509
  hypo
  uterine vs. melanoma,sarcoma

SEQ ID NO: 483130 - DNA, 116 bp, Homo sapiens; identical to SEQ ID NO: 363165
  chr2:241262542-241262658
  hypo

SEQ ID NO: 483131 - DNA, 196 bp, Homo sapiens; identical to SEQ ID NO: 353267
  chr2:241989264-241989460
  hypo
  uterine vs. anorectal

SEQ ID NO: 483132 - DNA, 463 bp, Homo sapiens; identical to SEQ ID NO: 455098
  chr2:242004407-242004870
  hypo
  uterine vs. breast,sarcoma,cervical,prostate,melanoma, non_cancer,lymphoid_neoplasm,pancreas_gallbladder, multiple_myeloma,myeloid_neoplasm

SEQ ID NO: 483133 - DNA, 47 bp, Homo sapiens; identical to SEQ ID NO: 461832
  chr2:242554503-242554550
  hypo
  uterine vs. liver_bileduct,renal,lymphoid_neoplasm, breast

SEQ ID NO: 483134 - DNA, 54 bp, Homo sapiens; identical to SEQ ID NO: 347965
  chr2:242554624-242554678
  hypo
  uterine vs. liver_bileduct,renal,lymphoid_neoplasm, breast

SEQ ID NO: 483135 - DNA, 225 bp, Homo sapiens
  chr2:242599560-242599785
  hypo
  uterine vs. head_and_neck,lung
cgccactgcactccagcctggccacagagcgagaatccgtcccccgccccccaaaaaaaagacctcattcagagccacagccgtaactgcgcacagattcacagtgggagtgggtcctgccctgtgactgtgggtgtgccaggtcaccacacaggtgtgtgctgggtcacagacacgccccttccctgcctctccattctgtttcttcatcgtctggccatcctc

SEQ ID NO: 483136 - DNA, 69 bp, Homo sapiens
  chr2:242766046-242766115
  hypo
  uterine vs. sarcoma
cgacgttctctttgtctgactttctgctcctgccgcgtgcgcagaggggcgaggaggaagcatttgcgc

SEQ ID NO: 483137 - DNA, 275 bp, Homo sapiens; identical to SEQ ID NO: 301198
  chr2:242766213-242766488
  hypo
  uterine vs. sarcoma

SEQ ID NO: 483138 - DNA, 10 bp, Homo sapiens
  chr2:242933420-242933430
  hypo
  uterine vs. breast
cggtttggat

SEQ ID NO: 483139 - DNA, 212 bp, Homo sapiens; identical to SEQ ID NO: 353285
  chr2:242933459-242933671
  hypo
  uterine vs. breast

SEQ ID NO: 483140 - DNA, 56 bp, Homo sapiens; identical to SEQ ID NO: 382849
  chr20:688354-688410
  hypo
  uterine vs. breast

SEQ ID NO: 483141 - DNA, 4 bp, Homo sapiens
  chr20:18489643-18489647
  hypo
  uterine vs. sarcoma,multiple_myeloma
cgtg

SEQ ID NO: 483142 - DNA, 270 bp, Homo sapiens; identical to SEQ ID NO: 356259
  chr20:30772699-30772969
  hypo
  uterine vs. cervical,melanoma,breast,lung

SEQ ID NO: 483143 - DNA, 436 bp, Homo sapiens; identical to SEQ ID NO: 473181
  chr20:35443740-35444176
  hypo
  uterine vs. liver_bileduct

SEQ ID NO: 483144 - DNA, 381 bp, Homo sapiens; identical to SEQ ID NO: 346230
  chr20:35444205-35444586
  hypo
  uterine vs. liver_bileduct

SEQ ID NO: 483145 - DNA, 161 bp, Homo sapiens; identical to SEQ ID NO: 344232
  chr20:36802873-36803034
  hypo
  uterine vs. liver_bileduct

SEQ ID NO: 483146 - DNA, 63 bp, Homo sapiens; identical to SEQ ID NO: 368352
  chr20:44602364-44602427
  hypo
  uterine vs. liver_bileduct

SEQ ID NO: 483147 - DNA, 455 bp, Homo sapiens; identical to SEQ ID NO: 344262
  chr20:46234984-46235439
  hypo
  uterine vs. bladder_and_urothelial,pancreas_gallbladder, melanoma,colorectal,anorectal,head_and_neck

SEQ ID NO: 483148 - DNA, 2 bp, Homo sapiens
  chr20:46823362-46823364
  hypo
cg

SEQ ID NO: 483149 - DNA, 93 bp, Homo sapiens; identical to SEQ ID NO: 356291
  chr20:46823583-46823676
  hypo

SEQ ID NO: 483150 - DNA, 50 bp, Homo sapiens; identical to SEQ ID NO: 356294
  chr20:47766299-47766349
  hypo
  uterine vs. upper_gi,cervical,breast

SEQ ID NO: 483151 - DNA, 75 bp, Homo sapiens; identical to SEQ ID NO: 479919
  chr20:48350342-48350417
  hypo
  uterine vs. lymphoid_neoplasm,breast

SEQ ID NO: 483152 - DNA, 165 bp, Homo sapiens; identical to SEQ ID NO: 472562
  chr20:48771177-48771342
  hypo
  uterine vs. melanoma

SEQ ID NO: 483153 - DNA, 136 bp, Homo sapiens; identical to SEQ ID NO: 459635
  chr20:55206463-55206599
  hypo
  uterine vs. cervical,breast

SEQ ID NO: 483154 - DNA, 4 bp, Homo sapiens
  chr20:55206736-55206740
  hypo
  uterine vs. cervical,breast
cgag

SEQ ID NO: 483155 - DNA, 95 bp, Homo sapiens; identical to SEQ ID NO: 352515
  chr20:55206774-55206869
  hypo
  uterine vs. cervical,breast

SEQ ID NO: 483156 - DNA, 91 bp, Homo sapiens; identical to SEQ ID NO: 356315
  chr20:56772299-56772390
  hypo
  uterine vs. melanoma,sarcoma

SEQ ID NO: 483157 - DNA, 307 bp, Homo sapiens; identical to SEQ ID NO: 344313
  chr20:56941603-56941910
  hypo
  uterine vs. liver_bileduct

SEQ ID NO: 483158 - DNA, 113 bp, Homo sapiens; identical to SEQ ID NO: 345643
  chr20:57225466-57225579
  hypo
  uterine vs. myeloid_neoplasm,thyroid,multiple_myeloma, non_cancer,bladder_and_urothelial,prostate,lymphoid_neoplasm, pancreas_gallbladder

SEQ ID NO: 483159 - DNA, 150 bp, Homo sapiens; identical to SEQ ID NO: 368460
  chr20:61314706-61314856
  hypo
  uterine vs. colorectal,anorectal,head_and_neck

SEQ ID NO: 483160 - DNA, 31 bp, Homo sapiens; identical to SEQ ID NO: 356350
  chr20:61991069-61991100
  hypo
  uterine vs. prostate,anorectal,pancreas_gallbladder, renal,head_and_neck

SEQ ID NO: 483161 - DNA, 379 bp, Homo sapiens; identical to SEQ ID NO: 375185
  chr20:62384600-62384979
  hypo
  uterine vs. breast

SEQ ID NO: 483162 - DNA, 204 bp, Homo sapiens; identical to SEQ ID NO: 356368
  chr20:62868769-62868973
  hypo
  uterine vs. cervical,colorectal,bladder_and_urothelial, anorectal,pancreas_gallbladder,melanoma,sarcoma

SEQ ID NO: 483163 - DNA, 55 bp, Homo sapiens; identical to SEQ ID NO: 344444
  chr21:30294975-30295030
  hypo
  uterine vs. liver_bileduct,upper_gi,pancreas_gallbladder, bladder_and_urothelial,breast,colorectal,lung,anorectal,sarcoma, lymphoid_neoplasm,head_and_neck

SEQ ID NO: 483164 - DNA, 176 bp, Homo sapiens; identical to SEQ ID NO: 344463
  chr21:36437239-36437415
  hypo
  uterine vs. breast,cervical,pancreas_gallbladder, melanoma,colorectal

SEQ ID NO: 483165 - DNA, 174 bp, Homo sapiens; identical to SEQ ID NO: 344471
  chr21:38176483-38176657
  hypo
  uterine vs. head_and_neck,melanoma

SEQ ID NO: 483166 - DNA, 79 bp, Homo sapiens; identical to SEQ ID NO: 458947
  chr21:38918381-38918460
  hypo
  uterine vs. anorectal,head_and_neck,lymphoid_neoplasm

SEQ ID NO: 483167 - DNA, 169 bp, Homo sapiens; identical to SEQ ID NO: 356382
  chr21:38918561-38918730
  hypo
  uterine vs. anorectal,head_and_neck,lymphoid_neoplasm

SEQ ID NO: 483168 - DNA, 396 bp, Homo sapiens; identical to SEQ ID NO: 356399
  chr21:43547667-43548063
  hypo
  uterine vs. colorectal,breast,lung,cervical

SEQ ID NO: 483169 - DNA, 240 bp, Homo sapiens; identical to SEQ ID NO: 473231
  chr21:43991061-43991301
  hypo
  uterine vs. liver_bileduct

SEQ ID NO: 483170 - DNA, 205 bp, Homo sapiens; identical to SEQ ID NO: 356402
  chr21:43991493-43991698
  hypo
  uterine vs. liver_bileduct

SEQ ID NO: 483171 - DNA, 209 bp, Homo sapiens; identical to SEQ ID NO: 344516
  chr21:44444714-44444923
  hypo
  uterine vs. lung,pancreas_gallbladder,colorectal

SEQ ID NO: 483172 - DNA, 15 bp, Homo sapiens
  chr21:44866930-44866945
  hypo
  uterine vs. renal
gtgccaggcacctgc

SEQ ID NO: 483173 - DNA, 15 bp, Homo sapiens
  chr21:46036558-46036573
  hypo
  uterine vs. colorectal
cgagaccctgccctg

SEQ ID NO: 483174 - DNA, 217 bp, Homo sapiens; identical to SEQ ID NO: 482207
  chr21:46351437-46351654
  hypo
  uterine vs. multiple_myeloma,sarcoma

SEQ ID NO: 483175 - DNA, 35 bp, Homo sapiens; identical to SEQ ID NO: 469070
  chr21:46351619-46351654
  hypo
  uterine vs. sarcoma,multiple_myeloma,prostate

SEQ ID NO: 483176 - DNA, 323 bp, Homo sapiens; identical to SEQ ID NO: 352573
  chr21:46352279-46352602
  hypo
  uterine vs. sarcoma,multiple_myeloma,prostate

SEQ ID NO: 483177 - DNA, 395 bp, Homo sapiens; identical to SEQ ID NO: 455949
  chr21:46352279-46352674
  hypo
  uterine vs. anorectal

SEQ ID NO: 483178 - DNA, 23 bp, Homo sapiens
  chr21:46352868-46352891
  hypo
  uterine vs. anorectal
cagcagaggacggggccggggcc

SEQ ID NO: 483179 - DNA, 19 bp, Homo sapiens
  chr21:47602441-47602460
  hypo
  uterine vs. liver_bileduct
cgcatcagggagctggccg

SEQ ID NO: 483180 - DNA, 384 bp, Homo sapiens; identical to SEQ ID NO: 349095
  chr21:47602705-47603089
  hypo
  uterine vs. liver_bileduct

SEQ ID NO: 483181 - DNA, 406 bp, Homo sapiens; identical to SEQ ID NO: 344666
  chr22:19830509-19830915
  hypo
  uterine vs. liver_bileduct

SEQ ID NO: 483182 - DNA, 10 bp, Homo sapiens
  chr22:21154023-21154033
  hypo
  uterine vs. renal,sarcoma
tgggtccacc

SEQ ID NO: 483183 - DNA, 201 bp, Homo sapiens; identical to SEQ ID NO: 344679
  chr22:21977477-21977678
  hypo
  uterine vs. colorectal

SEQ ID NO: 483184 - DNA, 18 bp, Homo sapiens
  chr22:22899582-22899600
  hypo
  uterine vs. cervical,colorectal,prostate, pancreas_gallbladder,anorectal,liver_bileduct, bladder_and_urothelial,breast,lung
cggtcttgcagcgacatt

SEQ ID NO: 483185 - DNA, 134 bp, Homo sapiens; identical to SEQ ID NO: 349101
  chr22:22899978-22900112
  hypo
  uterine vs. cervical,colorectal,prostate, pancreas_gallbladder,anorectal,liver_bileduct, bladder_and_urothelial,breast,lung

SEQ ID NO: 483186 - DNA, 187 bp, Homo sapiens; identical to SEQ ID NO: 295268
  chr22:24552924-24553111
  hypo

SEQ ID NO: 483187 - DNA, 300 bp, Homo sapiens; identical to SEQ ID NO: 480765
  chr22:27068622-27068922
  hypo
  uterine vs. lymphoid_neoplasm,pancreas_gallbladder, melanoma,prostate,sarcoma,renal,bladder_and_urothelial,lung, multiple_myeloma

SEQ ID NO: 483188 - DNA, 791 bp, Homo sapiens; identical to SEQ ID NO: 362059
  chr22:34316250-34317041
  hypo
  uterine vs. lung,upper_gi

SEQ ID NO: 483189 - DNA, 5 bp, Homo sapiens
  chr22:42109076-42109081
  hypo
  uterine vs. melanoma
cgctg

SEQ ID NO: 483190 - DNA, 123 bp, Homo sapiens; identical to SEQ ID NO: 344816
  chr22:45581821-45581944
  hypo
  uterine vs. colorectal,lung

SEQ ID NO: 483191 - DNA, 61 bp, Homo sapiens; identical to SEQ ID NO: 383577
  chr22:47441113-47441174
  hypo
  uterine vs. head_and_neck

SEQ ID NO: 483192 - DNA, 99 bp, Homo sapiens; identical to SEQ ID NO: 356579
  chr22:47441200-47441299
  hypo
  uterine vs. head_and_neck,liver_bileduct,melanoma, bladder_and_urothelial

SEQ ID NO: 483193 - DNA, 398 bp, Homo sapiens; identical to SEQ ID NO: 368870
  chr22:47534595-47534993
  hypo
  uterine vs. bladder_and_urothelial

SEQ ID NO: 483194 - DNA, 28 bp, Homo sapiens
  chr22:50623263-50623291
  hypo
  uterine vs. myeloid_neoplasm,multiple_myeloma,non_cancer, sarcoma,thyroid,prostate,renal
cgccagcgccaggtcagccaagaacccg

SEQ ID NO: 483195 - DNA, 76 bp, Homo sapiens; identical to SEQ ID NO: 357538
  chr3:6903188-6903264
  hypo
  uterine vs. ovary

SEQ ID NO: 483196 - DNA, 79 bp, Homo sapiens; identical to SEQ ID NO: 338032
  chr3:12605281-12605360
  hypo
  uterine vs. pancreas_gallbladder,liver_bileduct

SEQ ID NO: 483197 - DNA, 271 bp, Homo sapiens; identical to SEQ ID NO: 455200
  chr3:13611739-13612010
  hypo
  uterine vs. anorectal,renal

SEQ ID NO: 483198 - DNA, 186 bp, Homo sapiens; identical to SEQ ID NO: 363219
  chr3:13612341-13612527
  hypo
  uterine vs. anorectal,renal

SEQ ID NO: 483199 - DNA, 25 bp, Homo sapiens
  chr3:13679108-13679133
  hypo
cgccagcgcgcatcacgcactacca

SEQ ID NO: 483200 - DNA, 78 bp, Homo sapiens; identical to SEQ ID NO: 345081
  chr3:16555426-16555504
  hypo
  uterine vs. ovary,lymphoid_neoplasm,sarcoma,anorectal

SEQ ID NO: 483201 - DNA, 953 bp, Homo sapiens; identical to SEQ ID NO: 482239
  chr3:37033979-37034932
  hypo
  uterine vs. head_and_neck,cervical,lymphoid_neoplasm, lung,pancreas_gallbladder,liver_bileduct,bladder_and_urothelial, prostate,breast,anorectal,sarcoma,renal,upper_gi, multiple_myeloma,non_cancer,myeloid_neoplasm,melanoma,ovary

SEQ ID NO: 483202 - DNA, 959 bp, Homo sapiens; identical to SEQ ID NO: 482240
  chr3:37034440-37035399
  hypo
  uterine vs. lung,head_and_neck,lymphoid_neoplasm, cervical,ovary,pancreas_gallbladder,bladder_and_urothelial, breast,liver_bileduct,prostate,anorectal,sarcoma,renal, multiple_myeloma,upper_gi,myeloid_neoplasm,non_cancer,thyroid,
  CONT. FROM ABOVE: melanoma,colorectal

SEQ ID NO: 483203 - DNA, 119 bp, Homo sapiens; identical to SEQ ID NO: 338072
  chr3:37438337-37438456
  hypo
  uterine vs. liver_bileduct,lung

SEQ ID NO: 483204 - DNA, 122 bp, Homo sapiens; identical to SEQ ID NO: 338095
  chr3:48703720-48703842
  hypo
  uterine vs. melanoma

SEQ ID NO: 483205 - DNA, 552 bp, Homo sapiens; identical to SEQ ID NO: 465572
  chr3:52899918-52900470
  hypo
  uterine vs. liver_bileduct

SEQ ID NO: 483206 - DNA, 216 bp, Homo sapiens; identical to SEQ ID NO: 465573
  chr3:52900499-52900715
  hypo
  uterine vs. liver_bileduct

SEQ ID NO: 483207 - DNA, 333 bp, Homo sapiens; identical to SEQ ID NO: 455208
  chr3:53032401-53032734
  hypo
  uterine vs. head_and_neck,lymphoid_neoplasm,sarcoma, prostate,breast

SEQ ID NO: 483208 - DNA, 83 bp, Homo sapiens
  chr3:69937621-69937704
  hypo
  uterine vs. lymphoid_neoplasm,bladder_and_urothelial
cggtgccttaattagccacatgttctttttacctcctgggaaataagtacgggataaaattggggatcaagccgtagacgtac

SEQ ID NO: 483209 - DNA, 45 bp, Homo sapiens; identical to SEQ ID NO: 338139
  chr3:72420279-72420324
  hypo
  uterine vs. pancreas_gallbladder,upper_gi,breast, colorectal,anorectal,lung,melanoma

SEQ ID NO: 483210 - DNA, 33 bp, Homo sapiens; identical to SEQ ID NO: 338215
  chr3:141664320-141664353
  hypo

SEQ ID NO: 483211 - DNA, 185 bp, Homo sapiens; identical to SEQ ID NO: 338216
  chr3:141868994-141869179
  hypo
  uterine vs. liver_bileduct

SEQ ID NO: 483212 - DNA, 106 bp, Homo sapiens; identical to SEQ ID NO: 338227
  chr3:149360184-149360290
  hypo
  uterine vs. lung,head_and_neck,pancreas_gallbladder, liver_bileduct,breast,upper_gi,lymphoid_neoplasm

SEQ ID NO: 483213 - DNA, 52 bp, Homo sapiens; identical to SEQ ID NO: 363377
  chr3:156396583-156396635
  hypo
  uterine vs. pancreas_gallbladder,head_and_neck,breast

SEQ ID NO: 483214 - DNA, 242 bp, Homo sapiens; identical to SEQ ID NO: 482279
  chr3:169482439-169482681
  hypo
  uterine vs. breast,pancreas_gallbladder,prostate, colorectal,upper_gi,multiple_myeloma,lymphoid_neoplasm,renal, cervical,myeloid_neoplasm,thyroid,non_cancer,melanoma,anorectal, lung,bladder_and_urothelial,sarcoma,liver_bileduct,
  CONT. FROM ABOVE: head_and_neck

SEQ ID NO: 483215 - DNA, 54 bp, Homo sapiens; identical to SEQ ID NO: 345815
  chr3:169540679-169540733
  hypo
  uterine vs. sarcoma,renal,melanoma,prostate,non_cancer, thyroid

SEQ ID NO: 483216 - DNA, 283 bp, Homo sapiens; identical to SEQ ID NO: 453224
  chr3:170626174-170626457
  hypo
  uterine vs. colorectal

SEQ ID NO: 483217 - DNA, 26 bp, Homo sapiens
  chr3:170626710-170626736
  hypo
  uterine vs. colorectal
aggtttgttgcgttcgggtcgcagtc

SEQ ID NO: 483218 - DNA, 108 bp, Homo sapiens; identical to SEQ ID NO: 453226
  chr3:170626349-170626457
  hypo
  uterine vs. colorectal

SEQ ID NO: 483219 - DNA, 508 bp, Homo sapiens; identical to SEQ ID NO: 357752
  chr3:170626710-170627218
  hypo
  uterine vs. colorectal

SEQ ID NO: 483220 - DNA, 97 bp, Homo sapiens; identical to SEQ ID NO: 338249
  chr3:179377859-179377956
  hypo
  uterine vs. pancreas_gallbladder,upper_gi,melanoma, sarcoma,liver_bileduct

SEQ ID NO: 483221 - DNA, 207 bp, Homo sapiens; identical to SEQ ID NO: 453230
  chr3:180397104-180397311
  hypo
  uterine vs. ovary,lung,breast,sarcoma

SEQ ID NO: 483222 - DNA, 37 bp, Homo sapiens; identical to SEQ ID NO: 462827
  chr3:181430331-181430368
  hypo
  uterine vs. cervical,lung

SEQ ID NO: 483223 - DNA, 146 bp, Homo sapiens; identical to SEQ ID NO: 474124
  chr3:181430443-181430589
  hypo
  uterine vs. cervical,lung

SEQ ID NO: 483224 - DNA, 37 bp, Homo sapiens; identical to SEQ ID NO: 462827
  chr3:181430331-181430368
  hypo
  uterine vs. cervical

SEQ ID NO: 483225 - DNA, 253 bp, Homo sapiens; identical to SEQ ID NO: 462828
  chr3:181430443-181430696
  hypo
  uterine vs. cervical

SEQ ID NO: 483226 - DNA, 217 bp, Homo sapiens; identical to SEQ ID NO: 338261
  chr3:183217407-183217624
  hypo
  uterine vs. pancreas_gallbladder,colorectal,anorectal

SEQ ID NO: 483227 - DNA, 3 bp, Homo sapiens
  chr3:185271380-185271383
  hypo
  uterine vs. melanoma,sarcoma
ggc

SEQ ID NO: 483228 - DNA, 133 bp, Homo sapiens; identical to SEQ ID NO: 453234
  chr3:186079331-186079464
  hypo
  uterine vs. thyroid

SEQ ID NO: 483229 - DNA, 334 bp, Homo sapiens; identical to SEQ ID NO: 338292
  chr3:187443068-187443402
  hypo

SEQ ID NO: 483230 - DNA, 46 bp, Homo sapiens; identical to SEQ ID NO: 454388
  chr3:187455297-187455343
  hypo
  uterine vs. renal,multiple_myeloma

SEQ ID NO: 483231 - DNA, 447 bp, Homo sapiens; identical to SEQ ID NO: 454389
  chr3:187456666-187457113
  hypo
  uterine vs. colorectal

SEQ ID NO: 483232 - DNA, 346 bp, Homo sapiens; identical to SEQ ID NO: 338299
  chr3:193455077-193455423
  hypo
  uterine vs. bladder_and_urothelial

SEQ ID NO: 483233 - DNA, 74 bp, Homo sapiens; identical to SEQ ID NO: 338304
  chr3:193903180-193903254
  hypo
  uterine vs. bladder_and_urothelial,upper_gi

SEQ ID NO: 483234 - DNA, 296 bp, Homo sapiens; identical to SEQ ID NO: 338306
  chr3:193969977-193970273
  hypo
  uterine vs. upper_gi,bladder_and_urothelial, liver_bileduct,cervical

SEQ ID NO: 483235 - DNA, 32 bp, Homo sapiens; identical to SEQ ID NO: 353437
  chr4:619879-619911
  hypo
  uterine vs. colorectal,cervical,anorectal, pancreas_gallbladder,lymphoid_neoplasm,prostate

SEQ ID NO: 483236 - DNA, 44 bp, Homo sapiens; identical to SEQ ID NO: 455258
  chr4:628787-628831
  hypo
  uterine vs. anorectal,renal,thyroid,lymphoid_neoplasm

SEQ ID NO: 483237 - DNA, 87 bp, Homo sapiens; identical to SEQ ID NO: 465592
  chr4:628950-629037
  hypo
  uterine vs. anorectal,renal,thyroid,lymphoid_neoplasm

SEQ ID NO: 483238 - DNA, 44 bp, Homo sapiens; identical to SEQ ID NO: 455258
  chr4:628787-628831
  hypo
  uterine vs. anorectal,renal,cervical,lymphoid_neoplasm, melanoma,thyroid,non_cancer

SEQ ID NO: 483239 - DNA, 421 bp, Homo sapiens; identical to SEQ ID NO: 455259
  chr4:628950-629371
  hypo
  uterine vs. anorectal,renal,cervical,lymphoid_neoplasm, melanoma,thyroid,non_cancer

SEQ ID NO: 483240 - DNA, 27 bp, Homo sapiens
  chr4:629407-629434
  hypo
  uterine vs. anorectal,renal,cervical,lymphoid_neoplasm, melanoma,thyroid,non_cancer
tgggctccacgtgctcatctgcacatc

SEQ ID NO: 483241 - DNA, 2 bp, Homo sapiens
  chr4:650837-650839
  hypo
  uterine vs. prostate,myeloid_neoplasm,lymphoid_neoplasm
cg

SEQ ID NO: 483242 - DNA, 22 bp, Homo sapiens
  chr4:651348-651370
  hypo
  uterine vs. prostate,myeloid_neoplasm,lymphoid_neoplasm
ccaggggtcacccaggggtctc

SEQ ID NO: 483243 - DNA, 175 bp, Homo sapiens; identical to SEQ ID NO: 338350
  chr4:757757-757932
  hypo
  uterine vs. cervical

SEQ ID NO: 483244 - DNA, 136 bp, Homo sapiens; identical to SEQ ID NO: 345830
  chr4:1336902-1337038
  hypo
  uterine vs. bladder_and_urothelial,cervical,anorectal, head_and_neck,pancreas_gallbladder,breast,prostate,sarcoma, lymphoid_neoplasm,lung,upper_gi,colorectal

SEQ ID NO: 483245 - DNA, 276 bp, Homo sapiens; identical to SEQ ID NO: 338380
  chr4:1541591-1541867
  hypo
  uterine vs. pancreas_gallbladder,renal,cervical,breast, lymphoid_neoplasm,colorectal,bladder_and_urothelial

SEQ ID NO: 483246 - DNA, 507 bp, Homo sapiens; identical to SEQ ID NO: 363494
  chr4:1578103-1578610
  hypo
  uterine vs. cervical,breast

SEQ ID NO: 483247 - DNA, 57 bp, Homo sapiens; identical to SEQ ID NO: 456997
  chr4:1993659-1993716
  hypo
  uterine vs. sarcoma,lymphoid_neoplasm,prostate

SEQ ID NO: 483248 - DNA, 197 bp, Homo sapiens; identical to SEQ ID NO: 348041
  chr4:1994335-1994532
  hypo
  uterine vs. sarcoma,lymphoid_neoplasm,prostate

SEQ ID NO: 483249 - DNA, 211 bp, Homo sapiens; identical to SEQ ID NO: 338408
  chr4:2639936-2640147
  hypo
  uterine vs. melanoma,renal,liver_bileduct, bladder_and_urothelial,lymphoid_neoplasm,colorectal, pancreas_gallbladder,upper_gi

SEQ ID NO: 483250 - DNA, 81 bp, Homo sapiens; identical to SEQ ID NO: 338410
  chr4:2672891-2672972
  hypo
  uterine vs. bladder_and_urothelial,cervical,colorectal, head_and_neck

SEQ ID NO: 483251 - DNA, 855 bp, Homo sapiens; identical to SEQ ID NO: 338412
  chr4:2704088-2704943
  hypo
  uterine vs. bladder_and_urothelial,melanoma,colorectal, liver_bileduct,sarcoma,renal,cervical

SEQ ID NO: 483252 - DNA, 55 bp, Homo sapiens; identical to SEQ ID NO: 353470
  chr4:2926396-2926451
  hypo
  uterine vs. sarcoma,bladder_and_urothelial,melanoma

SEQ ID NO: 483253 - DNA, 438 bp, Homo sapiens; identical to SEQ ID NO: 338428
  chr4:4509159-4509597
  hypo
  uterine vs. lung

SEQ ID NO: 483254 - DNA, 65 bp, Homo sapiens; identical to SEQ ID NO: 473325
  chr4:25013897-25013962
  hypo
  uterine vs. pancreas_gallbladder,colorectal,breast, melanoma

SEQ ID NO: 483255 - DNA, 22 bp, Homo sapiens
  chr4:25014050-25014072
  hypo
  uterine vs. pancreas_gallbladder,colorectal,breast, melanoma
cacatcgttcttggagttgaac

SEQ ID NO: 483256 - DNA, 309 bp, Homo sapiens; identical to SEQ ID NO: 455274
  chr4:39447953-39448262
  hypo
  uterine vs. sarcoma,melanoma

SEQ ID NO: 483257 - DNA, 76 bp, Homo sapiens; identical to SEQ ID NO: 338489
  chr4:56222936-56223012
  hypo
  uterine vs. liver_bileduct

SEQ ID NO: 483258 - DNA, 310 bp, Homo sapiens; identical to SEQ ID NO: 338518
  chr4:99399725-99400035
  hypo
  uterine vs. colorectal,head_and_neck

SEQ ID NO: 483259 - DNA, 113 bp, Homo sapiens; identical to SEQ ID NO: 338520
  chr4:100555198-100555311
  hypo
  uterine vs. sarcoma

SEQ ID NO: 483260 - DNA, 706 bp, Homo sapiens; identical to SEQ ID NO: 473328
  chr4:100573606-100574312
  hypo
  uterine vs. colorectal,breast,bladder_and_urothelial, upper_gi

SEQ ID NO: 483261 - DNA, 758 bp, Homo sapiens; identical to SEQ ID NO: 473329
  chr4:100573865-100574623
  hypo
  uterine vs. liver_bileduct,colorectal,breast,melanoma, bladder_and_urothelial

SEQ ID NO: 483262 - DNA, 7 bp, Homo sapiens
  chr4:184667623-184667630
  hypo
  uterine vs. colorectal
cgatagg

SEQ ID NO: 483263 - DNA, 125 bp, Homo sapiens; identical to SEQ ID NO: 353523
  chr4:184667665-184667790
  hypo
  uterine vs. colorectal

SEQ ID NO: 483264 - DNA, 330 bp, Homo sapiens; identical to SEQ ID NO: 482329
  chr5:490894-491224
  hypo
  uterine vs. renal

SEQ ID NO: 483265 - DNA, 52 bp, Homo sapiens; identical to SEQ ID NO: 465643
  chr5:3324702-3324754
  hypo
  uterine vs. anorectal,lymphoid_neoplasm

SEQ ID NO: 483266 - DNA, 283 bp, Homo sapiens; identical to SEQ ID NO: 348078
  chr5:3325333-3325616
  hypo
  uterine vs. anorectal,lymphoid_neoplasm

SEQ ID NO: 483267 - DNA, 130 bp, Homo sapiens; identical to SEQ ID NO: 338685
  chr5:3326328-3326458
  hypo
  uterine vs. anorectal

SEQ ID NO: 483268 - DNA, 453 bp, Homo sapiens; identical to SEQ ID NO: 338705
  chr5:14328256-14328709
  hypo
  uterine vs. liver_bileduct,upper_gi,breast,colorectal, melanoma,pancreas_gallbladder,bladder_and_urothelial,renal, lymphoid_neoplasm,cervical,prostate,anorectal,lung

SEQ ID NO: 483269 - DNA, 71 bp, Homo sapiens; identical to SEQ ID NO: 338718
  chr5:31410355-31410426
  hypo
  uterine vs. liver_bileduct,colorectal,lymphoid_neoplasm, upper_gi,sarcoma

SEQ ID NO: 483270 - DNA, 50 bp, Homo sapiens; identical to SEQ ID NO: 345162
  chr5:49737299-49737349
  hypo
  uterine vs. ovary,bladder_and_urothelial,prostate, lymphoid_neoplasm,multiple_myeloma,pancreas_gallbladder,lung, non_cancer,thyroid,myeloid_neoplasm

SEQ ID NO: 483271 - DNA, 112 bp, Homo sapiens; identical to SEQ ID NO: 480026
  chr5:67590957-67591069
  hypo
  uterine vs. colorectal

SEQ ID NO: 483272 - DNA, 115 bp, Homo sapiens; identical to SEQ ID NO: 480027
  chr5:67591157-67591272
  hypo
  uterine vs. colorectal

SEQ ID NO: 483273 - DNA, 173 bp, Homo sapiens; identical to SEQ ID NO: 338750
  chr5:77291967-77292140
  hypo
  uterine vs. upper_gi

SEQ ID NO: 483274 - DNA, 112 bp, Homo sapiens; identical to SEQ ID NO: 338757
  chr5:86672217-86672329
  hypo
  uterine vs. upper_gi

SEQ ID NO: 483275 - DNA, 446 bp, Homo sapiens; identical to SEQ ID NO: 338765
  chr5:96111437-96111883
  hypo
  uterine vs. liver_bileduct,breast,colorectal,melanoma, bladder_and_urothelial,upper_gi

SEQ ID NO: 483276 - DNA, 132 bp, Homo sapiens; identical to SEQ ID NO: 338767
  chr5:96121466-96121598
  hypo
  uterine vs. breast,upper_gi,lymphoid_neoplasm, liver_bileduct,colorectal

SEQ ID NO: 483277 - DNA, 625 bp, Homo sapiens; identical to SEQ ID NO: 456042
  chr5:142781875-142782500
  hypo
  uterine vs. anorectal,renal,multiple_myeloma, myeloid_neoplasm,lung,bladder_and_urothelial,non_cancer

SEQ ID NO: 483278 - DNA, 78 bp, Homo sapiens; identical to SEQ ID NO: 456043
  chr5:142782625-142782703
  hypo
  uterine vs. anorectal,renal,multiple_myeloma, myeloid_neoplasm,lung,bladder_and_urothelial,non_cancer

SEQ ID NO: 483279 - DNA, 283 bp, Homo sapiens; identical to SEQ ID NO: 459751
  chr5:142782217-142782500
  hypo
  uterine vs. head_and_neck,lung,ovary,liver_bileduct, pancreas_gallbladder,cervical,melanoma,renal,anorectal, lymphoid_neoplasm,multiple_myeloma,bladder_and_urothelial, breast,non_cancer

SEQ ID NO: 483280 - DNA, 125 bp, Homo sapiens; identical to SEQ ID NO: 459752
  chr5:142782625-142782750
  hypo
  uterine vs. head_and_neck,lung,ovary,liver_bileduct, pancreas_gallbladder,cervical,melanoma,renal,anorectal, lymphoid_neoplasm,multiple_myeloma,bladder_and_urothelial, breast,non_cancer

SEQ ID NO: 483281 - DNA, 410 bp, Homo sapiens; identical to SEQ ID NO: 345197
  chr5:142782794-142783204
  hypo
  uterine vs. head_and_neck,lung,ovary,liver_bileduct, pancreas_gallbladder,cervical,melanoma,renal,anorectal, lymphoid_neoplasm,multiple_myeloma,bladder_and_urothelial, breast,non_cancer

SEQ ID NO: 483282 - DNA, 839 bp, Homo sapiens; identical to SEQ ID NO: 459754
  chr5:142783606-142784445
  hypo
  uterine vs. lung,liver_bileduct,head_and_neck

SEQ ID NO: 483283 - DNA, 718 bp, Homo sapiens; identical to SEQ ID NO: 454427
  chr5:142783958-142784676
  hypo
  uterine vs. ovary,head_and_neck,lung,liver_bileduct, renal,cervical,lymphoid_neoplasm,melanoma,breast,anorectal, sarcoma,multiple_myeloma,pancreas_gallbladder,prostate, non_cancer,thyroid,bladder_and_urothelial

SEQ ID NO: 483284 - DNA, 215 bp, Homo sapiens; identical to SEQ ID NO: 454428
  chr5:142784461-142784676
  hypo
  uterine vs. ovary,head_and_neck,cervical,lung, liver_bileduct,melanoma,breast,lymphoid_neoplasm,prostate, anorectal,sarcoma,renal,multiple_myeloma,pancreas_gallbladder, non_cancer,thyroid,bladder_and_urothelial,myeloid_neoplasm

SEQ ID NO: 483285 - DNA, 253 bp, Homo sapiens; identical to SEQ ID NO: 467490
  chr5:148650971-148651224
  hypo
  uterine vs. ovary

SEQ ID NO: 483286 - DNA, 73 bp, Homo sapiens; identical to SEQ ID NO: 482386
  chr5:160974540-160974613
  hypo
  uterine vs. ovary

SEQ ID NO: 483287 - DNA, 211 bp, Homo sapiens; identical to SEQ ID NO: 482387
  chr5:160974861-160975072
  hypo
  uterine vs. ovary

SEQ ID NO: 483288 - DNA, 244 bp, Homo sapiens; identical to SEQ ID NO: 458167
  chr5:170171140-170171384
  hypo
  uterine vs. bladder_and_urothelial

SEQ ID NO: 483289 - DNA, 388 bp, Homo sapiens; identical to SEQ ID NO: 350214
  chr5:170171413-170171801
  hypo
  uterine vs. bladder_and_urothelial

SEQ ID NO: 483290 - DNA, 114 bp, Homo sapiens; identical to SEQ ID NO: 473365
  chr5:176225713-176225827
  hypo
  uterine vs. head_and_neck

SEQ ID NO: 483291 - DNA, 3 bp, Homo sapiens
  chr5:178987428-178987431
  hypo
  uterine vs. head_and_neck
cgt

SEQ ID NO: 483292 - DNA, 55 bp, Homo sapiens; identical to SEQ ID NO: 346767
  chr6:393764-393819
  hypo
  uterine vs. lymphoid_neoplasm

SEQ ID NO: 483293 - DNA, 176 bp, Homo sapiens; identical to SEQ ID NO: 473368
  chr6:1708438-1708614
  hypo
  uterine vs. upper_gi,colorectal

SEQ ID NO: 483294 - DNA, 96 bp, Homo sapiens; identical to SEQ ID NO: 363945
  chr6:1708643-1708739
  hypo
  uterine vs. upper_gi,colorectal

SEQ ID NO: 483295 - DNA, 266 bp, Homo sapiens; identical to SEQ ID NO: 345875
  chr6:3285535-3285801
  hypo
  uterine vs. colorectal,renal,cervical,upper_gi, liver_bileduct,bladder_and_urothelial,pancreas_gallbladder, myeloid_neoplasm,melanoma,non_cancer,prostate

SEQ ID NO: 483296 - DNA, 162 bp, Homo sapiens; identical to SEQ ID NO: 338999
  chr6:21202340-21202502
  hypo
  uterine vs. bladder_and_urothelial

SEQ ID NO: 483297 - DNA, 126 bp, Homo sapiens; identical to SEQ ID NO: 464676
  chr6:26241269-26241395
  hypo
  uterine vs. non_cancer,multiple_myeloma,sarcoma

SEQ ID NO: 483298 - DNA, 53 bp, Homo sapiens
  chr6:34518788-34518841
  hypo
  uterine vs. bladder_and_urothelial,cervical
cgggccctcccagctggggcagccagcattattcccacttgacggacaagggc

SEQ ID NO: 483299 - DNA, 70 bp, Homo sapiens; identical to SEQ ID NO: 364009
  chr6:34518870-34518940
  hypo
  uterine vs. bladder_and_urothelial,cervical

SEQ ID NO: 483300 - DNA, 97 bp, Homo sapiens; identical to SEQ ID NO: 455331
  chr6:42762779-42762876
  hypo
  uterine vs. lymphoid_neoplasm

SEQ ID NO: 483301 - DNA, 1 bp, Homo sapiens
  chr6:42813538-42813539
  hypo
  uterine vs. lymphoid_neoplasm
c

SEQ ID NO: 483302 - DNA, 198 bp, Homo sapiens; identical to SEQ ID NO: 339069
  chr6:52141070-52141268
  hypo
  uterine vs. lung,head_and_neck,breast

SEQ ID NO: 483303 - DNA, 9 bp, Homo sapiens
  chr6:73333099-73333108
  hypo
  uterine vs. head_and_neck,breast,lung,thyroid, lymphoid_neoplasm,multiple_myeloma,prostate,anorectal, non_cancer
ttgtggcgc

SEQ ID NO: 483304 - DNA, 41 bp, Homo sapiens; identical to SEQ ID NO: 454461
  chr6:74019373-74019414
  hypo
  uterine vs. anorectal,lymphoid_neoplasm,lung, multiple_myeloma,myeloid_neoplasm,cervical,prostate,renal, non_cancer,pancreas_gallbladder,head_and_neck

SEQ ID NO: 483305 - DNA, 102 bp, Homo sapiens; identical to SEQ ID NO: 346835
  chr6:74020094-74020196
  hypo
  uterine vs. anorectal,lymphoid_neoplasm,lung, multiple_myeloma,myeloid_neoplasm,cervical,prostate,renal, non_cancer,pancreas_gallbladder,head_and_neck

SEQ ID NO: 483306 - DNA, 129 bp, Homo sapiens; identical to SEQ ID NO: 339096
  chr6:89554102-89554231
  hypo
  uterine vs. liver_bileduct,upper_gi,colorectal, lymphoid_neoplasm

SEQ ID NO: 483307 - DNA, 155 bp, Homo sapiens; identical to SEQ ID NO: 345249
  chr6:106961023-106961178
  hypo
  uterine vs. head_and_neck,lymphoid_neoplasm,colorectal, pancreas_gallbladder,myeloid_neoplasm,prostate,thyroid,cervical, non_cancer,anorectal

SEQ ID NO: 483308 - DNA, 184 bp, Homo sapiens; identical to SEQ ID NO: 339120
  chr6:111751880-111752064
  hypo
  uterine vs. upper_gi,lung,head_and_neck,liver_bileduct, lymphoid_neoplasm,pancreas_gallbladder,colorectal,melanoma, breast,renal

SEQ ID NO: 483309 - DNA, 135 bp, Homo sapiens; identical to SEQ ID NO: 339121
  chr6:111766152-111766287
  hypo
  uterine vs. head_and_neck

SEQ ID NO: 483310 - DNA, 56 bp, Homo sapiens; identical to SEQ ID NO: 339169
  chr6:158321417-158321473
  hypo
  uterine vs. head_and_neck

SEQ ID NO: 483311 - DNA, 520 bp, Homo sapiens; identical to SEQ ID NO: 346865
  chr6:158402113-158402633
  hypo
  uterine vs. pancreas_gallbladder,cervical,upper_gi

SEQ ID NO: 483312 - DNA, 973 bp, Homo sapiens
  chr6:167314272-167315245
  hypo
  uterine vs. head_and_neck,pancreas_gallbladder
cgcacaggagagagaacgcaacctgaacacacggtgggggctggaggaagaacgtcgggagatcacacagggaggagaacgccaggtgaacgcacaagagaaaacgcctggtgaacgcgcaaagaaaggagaaagccaggtgaacgcacagggagaacgccgcacaaccgcacaggtaggagaaagccatgtgaacgcacaaagaaaggagaacgctgagtgaacgcacacagggccgagaacgccaggggaacgcacacagtaaagagaacaccgagaacgccgtgggaacgcacaggagagagaacgccacgtgaacacacgagggagaacgccgcgggaacacacagaagggcgaatgcccggcgaacgcacagaggggagaacgccaggggaacacgcacgggggagaacgctgcgcgatcacacagcggggagaacaccgggtaaacacacactggggaaaacaccgcgtgaacgcatagaggggagaaccccgggtgaacacacagaggggagagctccgtgtgaacacaaagggaggagaacgcctggtgagcacacacggggagagaacaccgcgcggacccacaagggggagaatgcctggtgaacgtacagcgggaggggagaacgctggtgaacgcacagcggggaaaacgccatgtgaacgcacaaaggaaggagaacgccaggtgaactcatacagggggtaggaacgccagaggaaagcacacagtaaagagaaggccgtgggaacgcgcaggggagagaacgccgggagaacacagagggaggaaaatgccaggtgaacgcacaagggggaaaacgcctggtgaacgcacaaaggagaaagccaggtgaacgcacaagcagcagaacgccaagtgaacgcacgaggggagaatgctgcgccaacacacacgggaaacacaaccgcgcgagcacgcagtggggagaacggcacgcgaac

SEQ ID NO: 483313 - DNA, 969 bp, Homo sapiens; identical to SEQ ID NO: 472286
  chr6:167314769-167315738
  hypo
  uterine vs. head_and_neck,lung

SEQ ID NO: 483314 - DNA, 809 bp, Homo sapiens; identical to SEQ ID NO: 353856
  chr6:167315260-167316069
  hypo
  uterine vs. head_and_neck,colorectal, pancreas_gallbladder,lung,bladder_and_urothelial,renal,breast, anorectal,lymphoid_neoplasm

SEQ ID NO: 483315 - DNA, 85 bp, Homo sapiens; identical to SEQ ID NO: 473389
  chr6:167836474-167836559
  hypo
  uterine vs. liver_bileduct

SEQ ID NO: 483316 - DNA, 305 bp, Homo sapiens; identical to SEQ ID NO: 377854
  chr6:167836629-167836934
  hypo
  uterine vs. liver_bileduct

SEQ ID NO: 483317 - DNA, 272 bp, Homo sapiens
  chr6:170474572-170474844
  hypo
  uterine vs. renal,lymphoid_neoplasm,anorectal
cgcccgccatcctcctgcattagcatactcctaattgattaagtggatgattgattattggacccgtgcggtctgctttccagacccgttggctgggaatggaaagccacgctcggccctcggatgcagcagaagccccctgccccgtccgctccaggctgcagagccgaggtgattggcgccaggctgcccaccccgcctgccccagcaagtgcgtcgcgcccccatggtttctgctgtttgcatgtcaggtcccggcaggaagctgcagt

SEQ ID NO: 483318 - DNA, 163 bp, Homo sapiens; identical to SEQ ID NO: 353864
  chr6:170531590-170531753
  hypo
  uterine vs. head_and_neck,liver_bileduct, bladder_and_urothelial,pancreas_gallbladder,lung

SEQ ID NO: 483319 - DNA, 551 bp, Homo sapiens; identical to SEQ ID NO: 455353
  chr7:287728-288279
  hypo
  uterine vs. cervical

SEQ ID NO: 483320 - DNA, 172 bp, Homo sapiens; identical to SEQ ID NO: 455354
  chr7:288328-288500
  hypo
  uterine vs. cervical

SEQ ID NO: 483321 - DNA, 222 bp, Homo sapiens; identical to SEQ ID NO: 455355
  chr7:288057-288279
  hypo
  uterine vs. cervical

SEQ ID NO: 483322 - DNA, 468 bp, Homo sapiens; identical to SEQ ID NO: 348181
  chr7:288328-288796
  hypo
  uterine vs. cervical

SEQ ID NO: 483323 - DNA, 46 bp, Homo sapiens; identical to SEQ ID NO: 473392
  chr7:345250-345296
  hypo
  uterine vs. anorectal,lymphoid_neoplasm

SEQ ID NO: 483324 - DNA, 147 bp, Homo sapiens; identical to SEQ ID NO: 353872
  chr7:345608-345755
  hypo
  uterine vs. anorectal,lymphoid_neoplasm

SEQ ID NO: 483325 - DNA, 473 bp, Homo sapiens; identical to SEQ ID NO: 377918
  chr7:617508-617981
  hypo
  uterine vs. head_and_neck

SEQ ID NO: 483326 - DNA, 245 bp, Homo sapiens; identical to SEQ ID NO: 364210
  chr7:818254-818499
  hypo
  uterine vs. liver_bileduct

SEQ ID NO: 483327 - DNA, 333 bp, Homo sapiens; identical to SEQ ID NO: 332995
  chr7:1001822-1002155
  hypo
  uterine vs. colorectal

SEQ ID NO: 483328 - DNA, 92 bp, Homo sapiens; identical to SEQ ID NO: 462064
  chr7:1029909-1030001
  hypo
  uterine vs. multiple_myeloma,renal

SEQ ID NO: 483329 - DNA, 76 bp, Homo sapiens
  chr7:1303350-1303426
  hypo
  uterine vs. lymphoid_neoplasm
cgattaccccgctccccgcctgggaacatgtggcctggcatatgtggggccaacctcagcagaaatccacgtgcac

SEQ ID NO: 483330 - DNA, 124 bp, Homo sapiens; identical to SEQ ID NO: 455366
  chr7:1308164-1308288
  hypo
  uterine vs. anorectal

SEQ ID NO: 483331 - DNA, 140 bp, Homo sapiens; identical to SEQ ID NO: 455367
  chr7:1315705-1315845
  hypo
  uterine vs. head_and_neck,anorectal,cervical, pancreas_gallbladder,colorectal,lymphoid_neoplasm

SEQ ID NO: 483332 - DNA, 178 bp, Homo sapiens; identical to SEQ ID NO: 364226
  chr7:1333680-1333858
  hypo
  uterine vs. cervical

SEQ ID NO: 483333 - DNA, 423 bp, Homo sapiens
  chr7:1370055-1370478
  hypo
cgtgatggctcaggtgcgtcttccacgcagatcactctggcagggagcgcggatggagacccgaggctggggcctgctggctttgcccctctacgcgaacagaatggcctctgccctgcaggaatcttgagtccaggagaggagagtttccctggaggtggaggtcaggcccggcagtcagcaggccaagctccttcgggccagggcaagccggagggcttcccagagcgggcacagtggacagctgagcaggccagactctgacatgaggtctggacaggcccttccgcccttccggatgccagtccccctgcttgtctgaccactggcccgcctgcccacggggcggctgagatgctggcgtgtgcgtgcgcatgtgcacgtgtgtttgtgtgcgcgtggggctttctgacagccgataat

SEQ ID NO: 483334 - DNA, 102 bp, Homo sapiens; identical to SEQ ID NO: 455368
  chr7:1460672-1460774
  hypo
  uterine vs. prostate,renal,thyroid

SEQ ID NO: 483335 - DNA, 30 bp, Homo sapiens; identical to SEQ ID NO: 455369
  chr7:1460958-1460988
  hypo
  uterine vs. prostate,renal,thyroid

SEQ ID NO: 483336 - DNA, 421 bp, Homo sapiens; identical to SEQ ID NO: 353892
  chr7:1641978-1642399
  hypo
  uterine vs. sarcoma

SEQ ID NO: 483337 - DNA, 253 bp, Homo sapiens; identical to SEQ ID NO: 348189
  chr7:2071776-2072029
  hypo
  uterine vs. lung

SEQ ID NO: 483338 - DNA, 84 bp, Homo sapiens; identical to SEQ ID NO: 350505
  chr7:3083602-3083686
  hypo
  uterine vs. non_cancer,myeloid_neoplasm, pancreas_gallbladder,bladder_and_urothelial,thyroid

SEQ ID NO: 483339 - DNA, 225 bp, Homo sapiens; identical to SEQ ID NO: 473414
  chr7:4856619-4856844
  hypo
  uterine vs. cervical,lymphoid_neoplasm,anorectal

SEQ ID NO: 483340 - DNA, 100 bp, Homo sapiens; identical to SEQ ID NO: 345898
  chr7:4857296-4857396
  hypo
  uterine vs. cervical,lymphoid_neoplasm,anorectal

SEQ ID NO: 483341 - DNA, 545 bp, Homo sapiens; identical to SEQ ID NO: 364297
  chr7:5428491-5429036
  hypo
  uterine vs. lung,head_and_neck

SEQ ID NO: 483342 - DNA, 145 bp, Homo sapiens; identical to SEQ ID NO: 339383
  chr7:6058662-6058807
  hypo
  uterine vs. bladder_and_urothelial,cervical

SEQ ID NO: 483343 - DNA, 142 bp, Homo sapiens; identical to SEQ ID NO: 345270
  chr7:27136790-27136932
  hypo
  uterine vs. bladder_and_urothelial

SEQ ID NO: 483344 - DNA, 456 bp, Homo sapiens; identical to SEQ ID NO: 353956
  chr7:27531253-27531709
  hypo
  uterine vs. pancreas_gallbladder,lymphoid_neoplasm

SEQ ID NO: 483345 - DNA, 88 bp, Homo sapiens; identical to SEQ ID NO: 339436
  chr7:27651058-27651146
  hypo
  uterine vs. colorectal

SEQ ID NO: 483346 - DNA, 62 bp, Homo sapiens; identical to SEQ ID NO: 339445
  chr7:29390389-29390451
  hypo
  uterine vs. pancreas_gallbladder,colorectal

SEQ ID NO: 483347 - DNA, 254 bp, Homo sapiens; identical to SEQ ID NO: 339463
  chr7:36124398-36124652
  hypo
  uterine vs. colorectal,head_and_neck,anorectal

SEQ ID NO: 483348 - DNA, 27 bp, Homo sapiens
  chr7:39453515-39453542
  hypo
  uterine vs. sarcoma,ovary,non_cancer,myeloid_neoplasm, multiple_myeloma,renal
cgcttcgggaaaataacgagcccctca

SEQ ID NO: 483349 - DNA, 259 bp, Homo sapiens; identical to SEQ ID NO: 364371
  chr7:42237185-42237444
  hypo
  uterine vs. head_and_neck

SEQ ID NO: 483350 - DNA, 51 bp, Homo sapiens; identical to SEQ ID NO: 348228
  chr7:44740672-44740723
  hypo
  uterine vs. pancreas_gallbladder

SEQ ID NO: 483351 - DNA, 168 bp, Homo sapiens; identical to SEQ ID NO: 358843
  chr7:45299683-45299851
  hypo
  uterine vs. melanoma

SEQ ID NO: 483352 - DNA, 54 bp, Homo sapiens; identical to SEQ ID NO: 339532
  chr7:65562589-65562643
  hypo
  uterine vs. liver_bileduct

SEQ ID NO: 483353 - DNA, 87 bp, Homo sapiens; identical to SEQ ID NO: 364429
  chr7:77309610-77309697
  hypo
  uterine vs. lymphoid_neoplasm,melanoma,renal

SEQ ID NO: 483354 - DNA, 442 bp, Homo sapiens; identical to SEQ ID NO: 482448
  chr7:79082579-79083021
  hypo
  uterine vs. ovary

SEQ ID NO: 483355 - DNA, 195 bp, Homo sapiens; identical to SEQ ID NO: 453422
  chr7:79082826-79083021
  hypo
  uterine vs. sarcoma,liver_bileduct

SEQ ID NO: 483356 - DNA, 15 bp, Homo sapiens
  chr7:99156600-99156615
  hypo
  uterine vs. lymphoid_neoplasm
ccgccgtcaggagcc

SEQ ID NO: 483357 - DNA, 236 bp, Homo sapiens; identical to SEQ ID NO: 339571
  chr7:100064586-100064822
  hypo
  uterine vs. cervical,upper_gi,colorectal,melanoma, liver_bileduct,head_and_neck,breast,bladder_and_urothelial, prostate,lymphoid_neoplasm,myeloid_neoplasm,anorectal, non_cancer,lung,multiple_myeloma

SEQ ID NO: 483358 - DNA, 132 bp, Homo sapiens; identical to SEQ ID NO: 339582
  chr7:101536683-101536815
  hypo
  uterine vs. upper_gi,lung,liver_bileduct, pancreas_gallbladder

SEQ ID NO: 483359 - DNA, 82 bp, Homo sapiens; identical to SEQ ID NO: 460499
  chr7:101627660-101627742
  hypo
  uterine vs. lung,upper_gi

SEQ ID NO: 483360 - DNA, 282 bp, Homo sapiens; identical to SEQ ID NO: 354034
  chr7:101627846-101628128
  hypo
  uterine vs. lung,upper_gi

SEQ ID NO: 483361 - DNA, 32 bp, Homo sapiens; identical to SEQ ID NO: 460502
  chr7:105279344-105279376
  hypo
  uterine vs. melanoma,liver_bileduct,lymphoid_neoplasm

SEQ ID NO: 483362 - DNA, 148 bp, Homo sapiens; identical to SEQ ID NO: 463885
  chr7:106622687-106622835
  hypo

SEQ ID NO: 483363 - DNA, 408 bp, Homo sapiens; identical to SEQ ID NO: 467694
  chr7:113726962-113727370
  hypo
  uterine vs. anorectal,head_and_neck

SEQ ID NO: 483364 - DNA, 52 bp, Homo sapiens; identical to SEQ ID NO: 464784
  chr7:126891155-126891207
  hypo
  uterine vs. thyroid,ovary,non_cancer,renal, multiple_myeloma,anorectal,cervical,colorectal,prostate

SEQ ID NO: 483365 - DNA, 165 bp, Homo sapiens; identical to SEQ ID NO: 339639
  chr7:135611103-135611268
  hypo
  uterine vs. liver_bileduct

SEQ ID NO: 483366 - DNA, 241 bp, Homo sapiens; identical to SEQ ID NO: 339646
  chr7:139690720-139690961
  hypo
  uterine vs. renal,pancreas_gallbladder,lymphoid_neoplasm

SEQ ID NO: 483367 - DNA, 32 bp, Homo sapiens; identical to SEQ ID NO: 460507
  chr7:140156493-140156525
  hypo
  uterine vs. breast,lymphoid_neoplasm,prostate,cervical

SEQ ID NO: 483368 - DNA, 98 bp, Homo sapiens; identical to SEQ ID NO: 339664
  chr7:148907697-148907795
  hypo
  uterine vs. lung,head_and_neck

SEQ ID NO: 483369 - DNA, 117 bp, Homo sapiens; identical to SEQ ID NO: 339668
  chr7:150006604-150006721
  hypo
  uterine vs. lung,upper_gi,bladder_and_urothelial,breast, lymphoid_neoplasm,colorectal,liver_bileduct, pancreas_gallbladder,prostate,cervical,anorectal,head_and_neck

SEQ ID NO: 483370 - DNA, 112 bp, Homo sapiens; identical to SEQ ID NO: 339669
  chr7:150006790-150006902
  hypo
  uterine vs. lung,pancreas_gallbladder,breast,upper_gi, liver_bileduct

SEQ ID NO: 483371 - DNA, 313 bp, Homo sapiens; identical to SEQ ID NO: 339694
  chr7:152273159-152273472
  hypo
  uterine vs. breast,anorectal,renal

SEQ ID NO: 483372 - DNA, 1 bp, Homo sapiens
  chr7:155581242-155581243
  hypo
  uterine vs. lymphoid_neoplasm,prostate,non_cancer
c

SEQ ID NO: 483373 - DNA, 39 bp, Homo sapiens; identical to SEQ ID NO: 345928
  chr7:155581980-155582019
  hypo
  uterine vs. lymphoid_neoplasm,prostate,non_cancer

SEQ ID NO: 483374 - DNA, 180 bp, Homo sapiens; identical to SEQ ID NO: 473443
  chr7:156832501-156832681
  hypo
  uterine vs. anorectal,cervical

SEQ ID NO: 483375 - DNA, 16 bp, Homo sapiens
  chr7:156833180-156833196
  hypo
  uterine vs. anorectal,cervical
tgcccttcgacagggc

SEQ ID NO: 483376 - DNA, 30 bp, Homo sapiens; identical to SEQ ID NO: 454497
  chr7:157129285-157129315
  hypo
  uterine vs. cervical,anorectal

SEQ ID NO: 483377 - DNA, 426 bp, Homo sapiens; identical to SEQ ID NO: 454022
  chr7:157890859-157891285
  hypo
  uterine vs. renal,lymphoid_neoplasm,prostate

SEQ ID NO: 483378 - DNA, 98 bp, Homo sapiens; identical to SEQ ID NO: 364614
  chr7:157891519-157891617
  hypo
  uterine vs. renal,lymphoid_neoplasm,prostate

SEQ ID NO: 483379 - DNA, 30 bp, Homo sapiens
  chr7:158550070-158550100
  hypo
  uterine vs. ovary,pancreas_gallbladder,colorectal, anorectal
cgacgctcgcctctcttttaagtagccaca

SEQ ID NO: 483380 - DNA, 15 bp, Homo sapiens
  chr7:158550339-158550354
  hypo
  uterine vs. ovary,pancreas_gallbladder,colorectal, anorectal
cgccaggcaccccgc

SEQ ID NO: 483381 - DNA, 260 bp, Homo sapiens; identical to SEQ ID NO: 354147
  chr8:591683-591943
  hypo
  uterine vs. melanoma,colorectal,anorectal,breast

SEQ ID NO: 483382 - DNA, 174 bp, Homo sapiens; identical to SEQ ID NO: 378498
  chr8:6434512-6434686
  hypo
  uterine vs. cervical

SEQ ID NO: 483383 - DNA, 416 bp, Homo sapiens; identical to SEQ ID NO: 339834
  chr8:8731310-8731726
  hypo
  uterine vs. breast,anorectal,cervical

SEQ ID NO: 483384 - DNA, 125 bp, Homo sapiens; identical to SEQ ID NO: 459174
  chr8:8748226-8748351
  hypo
  uterine vs. melanoma

SEQ ID NO: 483385 - DNA, 85 bp, Homo sapiens; identical to SEQ ID NO: 459175
  chr8:8749088-8749173
  hypo
  uterine vs. melanoma

SEQ ID NO: 483386 - DNA, 533 bp, Homo sapiens; identical to SEQ ID NO: 354155
  chr8:8749088-8749621
  hypo
  uterine vs. breast,melanoma

SEQ ID NO: 483387 - DNA, 101 bp, Homo sapiens; identical to SEQ ID NO: 339837
  chr8:8898512-8898613
  hypo
  uterine vs. liver_bileduct,bladder_and_urothelial, colorectal,prostate

SEQ ID NO: 483388 - DNA, 17 bp, Homo sapiens
  chr8:11058136-11058153
  hypo
  uterine vs. ovary,prostate,lymphoid_neoplasm
cggagaggcgacacagg

SEQ ID NO: 483389 - DNA, 183 bp, Homo sapiens; identical to SEQ ID NO: 482469
  chr8:11058799-11058982
  hypo
  uterine vs. ovary,prostate,lymphoid_neoplasm

SEQ ID NO: 483390 - DNA, 377 bp, Homo sapiens; identical to SEQ ID NO: 481136
  chr8:11058799-11059176
  hypo
  uterine vs. ovary,prostate,lymphoid_neoplasm, multiple_myeloma,melanoma,non_cancer

SEQ ID NO: 483391 - DNA, 82 bp, Homo sapiens; identical to SEQ ID NO: 473456
  chr8:11708345-11708427
  hypo
  uterine vs. cervical

SEQ ID NO: 483392 - DNA, 5 bp, Homo sapiens
  chr8:16884178-16884183
  hypo
  uterine vs. ovary
cggaa

SEQ ID NO: 483393 - DNA, 85 bp, Homo sapiens; identical to SEQ ID NO: 458295
  chr8:16884239-16884324
  hypo
  uterine vs. ovary

SEQ ID NO: 483394 - DNA, 78 bp, Homo sapiens; identical to SEQ ID NO: 339850
  chr8:18541368-18541446
  hypo
  uterine vs. lung

SEQ ID NO: 483395 - DNA, 20 bp, Homo sapiens
  chr8:23020932-23020952
  hypo
  uterine vs. colorectal
cgaacgaacgaacgaacgaa

SEQ ID NO: 483396 - DNA, 25 bp, Homo sapiens
  chr8:23021107-23021132
  hypo
  uterine vs. colorectal
cggcccggtcgctcctgcccagccc

SEQ ID NO: 483397 - DNA, 127 bp, Homo sapiens; identical to SEQ ID NO: 345299
  chr8:23021590-23021717
  hypo
  uterine vs. colorectal

SEQ ID NO: 483398 - DNA, 197 bp, Homo sapiens; identical to SEQ ID NO: 454027
  chr8:23423722-23423919
  hypo
  uterine vs. melanoma,renal,liver_bileduct, lymphoid_neoplasm

SEQ ID NO: 483399 - DNA, 146 bp, Homo sapiens; identical to SEQ ID NO: 339869
  chr8:26481184-26481330
  hypo
  uterine vs. pancreas_gallbladder

SEQ ID NO: 483400 - DNA, 191 bp, Homo sapiens; identical to SEQ ID NO: 378538
  chr8:27315867-27316058
  hypo
  uterine vs. anorectal

SEQ ID NO: 483401 - DNA, 139 bp, Homo sapiens; identical to SEQ ID NO: 465785
  chr8:28938419-28938558
  hypo
  uterine vs. colorectal,liver_bileduct

SEQ ID NO: 483402 - DNA, 136 bp, Homo sapiens; identical to SEQ ID NO: 212229
  chr8:28938587-28938723
  hypo
  uterine vs. colorectal,liver_bileduct

SEQ ID NO: 483403 - DNA, 267 bp, Homo sapiens; identical to SEQ ID NO: 350760
  chr8:65494311-65494578
  hypo
  uterine vs. sarcoma,anorectal,myeloid_neoplasm,lung, thyroid,prostate

SEQ ID NO: 483404 - DNA, 55 bp, Homo sapiens; identical to SEQ ID NO: 346990
  chr8:72756949-72757004
  hypo
  uterine vs. sarcoma,renal,melanoma,non_cancer, myeloid_neoplasm

SEQ ID NO: 483405 - DNA, 195 bp, Homo sapiens; identical to SEQ ID NO: 453471
  chr8:77589904-77590099
  hypo
  uterine vs. melanoma

SEQ ID NO: 483406 - DNA, 245 bp, Homo sapiens; identical to SEQ ID NO: 350781
  chr8:91657421-91657666
  hypo
  uterine vs. liver_bileduct,bladder_and_urothelial

SEQ ID NO: 483407 - DNA, 303 bp, Homo sapiens; identical to SEQ ID NO: 340011
  chr8:124186923-124187226
  hypo
  uterine vs. colorectal

SEQ ID NO: 483408 - DNA, 440 bp, Homo sapiens; identical to SEQ ID NO: 340028
  chr8:128893135-128893575
  hypo
  uterine vs. colorectal

SEQ ID NO: 483409 - DNA, 14 bp, Homo sapiens
  chr8:129070012-129070026
  hypo
  uterine vs. upper_gi
cccacggtgtgtgc

SEQ ID NO: 483410 - DNA, 131 bp, Homo sapiens; identical to SEQ ID NO: 340049
  chr8:140932087-140932218
  hypo
  uterine vs. bladder_and_urothelial

SEQ ID NO: 483411 - DNA, 110 bp, Homo sapiens; identical to SEQ ID NO: 340051
  chr8:140950018-140950128
  hypo
  uterine vs. upper_gi

SEQ ID NO: 483412 - DNA, 12 bp, Homo sapiens
  chr8:141596808-141596820
  hypo
  uterine vs. anorectal,prostate,breast,cervical, lymphoid_neoplasm,melanoma,renal,bladder_and_urothelial, colorectal
cgactgagcttc

SEQ ID NO: 483413 - DNA, 22 bp, Homo sapiens
  chr8:141597187-141597209
  hypo
  uterine vs. anorectal,prostate,breast,cervical, lymphoid_neoplasm,melanoma,renal,bladder_and_urothelial, colorectal
agtccaggcacagacgcagctc

SEQ ID NO: 483414 - DNA, 68 bp, Homo sapiens; identical to SEQ ID NO: 345958
  chr8:143558643-143558711
  hypo
  uterine vs. pancreas_gallbladder,cervical

SEQ ID NO: 483415 - DNA, 129 bp, Homo sapiens; identical to SEQ ID NO: 354287
  chr8:144383407-144383536
  hypo
  uterine vs. melanoma

SEQ ID NO: 483416 - DNA, 93 bp, Homo sapiens; identical to SEQ ID NO: 481188
  chr9:214559-214652
  hypo
  uterine vs. bladder_and_urothelial

SEQ ID NO: 483417 - DNA, 167 bp, Homo sapiens; identical to SEQ ID NO: 340170
  chr9:4864421-4864588
  hypo
  uterine vs. head_and_neck,anorectal,cervical,colorectal, renal,liver_bileduct

SEQ ID NO: 483418 - DNA, 70 bp, Homo sapiens; identical to SEQ ID NO: 359268
  chr9:6412900-6412970
  hypo
  uterine vs. sarcoma,lymphoid_neoplasm

SEQ ID NO: 483419 - DNA, 62 bp, Homo sapiens; identical to SEQ ID NO: 340205
  chr9:71760295-71760357
  hypo
  uterine vs. upper_gi

SEQ ID NO: 483420 - DNA, 330 bp, Homo sapiens; identical to SEQ ID NO: 340220
  chr9:81892891-81893221
  hypo
  uterine vs. cervical,colorectal,lymphoid_neoplasm, sarcoma,head_and_neck,breast

SEQ ID NO: 483421 - DNA, 261 bp, Homo sapiens; identical to SEQ ID NO: 482512
  chr9:82185383-82185644
  hypo
  uterine vs. ovary,anorectal,bladder_and_urothelial, multiple_myeloma,cervical,non_cancer

SEQ ID NO: 483422 - DNA, 469 bp, Homo sapiens; identical to SEQ ID NO: 347033
  chr9:82185703-82186172
  hypo
  uterine vs. ovary,anorectal,bladder_and_urothelial, multiple_myeloma,cervical,non_cancer

SEQ ID NO: 483423 - DNA, 396 bp, Homo sapiens; identical to SEQ ID NO: 354332
  chr9:86590191-86590587
  hypo
  uterine vs. pancreas_gallbladder,liver_bileduct, head_and_neck,melanoma,upper_gi,anorectal, bladder_and_urothelial,sarcoma,cervical,lung,multiple_myeloma, colorectal,renal

SEQ ID NO: 483424 - DNA, 146 bp, Homo sapiens; identical to SEQ ID NO: 340236
  chr9:95381233-95381379
  hypo
  uterine vs. lung

SEQ ID NO: 483425 - DNA, 28 bp, Homo sapiens
  chr9:104248623-104248651
  hypo
  uterine vs. ovary,upper_gi,cervical
gctggtttttcctggtcctgggagggac

SEQ ID NO: 483426 - DNA, 149 bp, Homo sapiens; identical to SEQ ID NO: 456192
  chr9:104248697-104248846
  hypo
  uterine vs. ovary,upper_gi,cervical

SEQ ID NO: 483427 - DNA, 186 bp, Homo sapiens; identical to SEQ ID NO: 347048
  chr9:104248975-104249161
  hypo
  uterine vs. ovary,upper_gi,cervical

SEQ ID NO: 483428 - DNA, 149 bp, Homo sapiens; identical to SEQ ID NO: 456192
  chr9:104248697-104248846
  hypo
  uterine vs. ovary,upper_gi

SEQ ID NO: 483429 - DNA, 500 bp, Homo sapiens; identical to SEQ ID NO: 482519
  chr9:104248975-104249475
  hypo
  uterine vs. ovary,upper_gi

SEQ ID NO: 483430 - DNA, 203 bp, Homo sapiens; identical to SEQ ID NO: 340315
  chr9:126180763-126180966
  hypo
  uterine vs. breast,bladder_and_urothelial,melanoma

SEQ ID NO: 483431 - DNA, 109 bp, Homo sapiens; identical to SEQ ID NO: 340316
  chr9:126321044-126321153
  hypo
  uterine vs. liver_bileduct

SEQ ID NO: 483432 - DNA, 138 bp, Homo sapiens; identical to SEQ ID NO: 454062
  chr9:126348901-126349039
  hypo
  uterine vs. liver_bileduct,bladder_and_urothelial, colorectal,lymphoid_neoplasm,pancreas_gallbladder,sarcoma, melanoma,renal,cervical

SEQ ID NO: 483433 - DNA, 41 bp, Homo sapiens; identical to SEQ ID NO: 454063
  chr9:126349104-126349145
  hypo
  uterine vs. liver_bileduct,bladder_and_urothelial, colorectal,lymphoid_neoplasm,pancreas_gallbladder,sarcoma, melanoma,renal,cervical

SEQ ID NO: 483434 - DNA, 277 bp, Homo sapiens; identical to SEQ ID NO: 340350
  chr9:132633604-132633881
  hypo
  uterine vs. liver_bileduct,lung,breast, bladder_and_urothelial,colorectal,upper_gi,cervical, head_and_neck,pancreas_gallbladder,melanoma,sarcoma

SEQ ID NO: 483435 - DNA, 477 bp, Homo sapiens; identical to SEQ ID NO: 340353
  chr9:132874127-132874604
  hypo
  uterine vs. breast,pancreas_gallbladder

SEQ ID NO: 483436 - DNA, 344 bp, Homo sapiens; identical to SEQ ID NO: 365088
  chr9:133366650-133366994
  hypo
  uterine vs. liver_bileduct,colorectal

SEQ ID NO: 483437 - DNA, 14 bp, Homo sapiens
  chr9:133779947-133779961
  hypo
  uterine vs. renal,prostate
ccctgggtctaggc

SEQ ID NO: 483438 - DNA, 64 bp, Homo sapiens; identical to SEQ ID NO: 470861
  chr9:133799052-133799116
  hypo
  uterine vs. cervical

SEQ ID NO: 483439 - DNA, 399 bp, Homo sapiens; identical to SEQ ID NO: 365094
  chr9:133799196-133799595
  hypo
  uterine vs. cervical

SEQ ID NO: 483440 - DNA, 33 bp, Homo sapiens; identical to SEQ ID NO: 348382
  chr9:135865230-135865263
  hypo
  uterine vs. renal

SEQ ID NO: 483441 - DNA, 113 bp, Homo sapiens; identical to SEQ ID NO: 340390
  chr9:135908551-135908664
  hypo
  uterine vs. liver_bileduct

SEQ ID NO: 483442 - DNA, 51 bp, Homo sapiens; identical to SEQ ID NO: 354417
  chr9:138661962-138662013
  hypo
  uterine vs. renal

SEQ ID NO: 483443 - DNA, 376 bp, Homo sapiens; identical to SEQ ID NO: 459911
  chr9:140024237-140024613
  hypo
  uterine vs. breast,cervical

SEQ ID NO: 483444 - DNA, 32 bp, Homo sapiens; identical to SEQ ID NO: 473520
  chr9:140030217-140030249
  hypo
  uterine vs. breast,colorectal,prostate,renal, pancreas_gallbladder

SEQ ID NO: 483445 - DNA, 11 bp, Homo sapiens
  chr9:140030575-140030586
  hypo
  uterine vs. breast,colorectal,prostate,renal, pancreas_gallbladder
tgcctgcggtc

SEQ ID NO: 483446 - DNA, 374 bp, Homo sapiens; identical to SEQ ID NO: 473523
  chr9:140265361-140265735
  hypo
  uterine vs. breast,anorectal

SEQ ID NO: 483447 - DNA, 183 bp, Homo sapiens; identical to SEQ ID NO: 348403
  chr9:140265902-140266085
  hypo
  uterine vs. breast,anorectal

SEQ ID NO: 483448 - DNA, 422 bp, Homo sapiens; identical to SEQ ID NO: 365188
  chr9:140267962-140268384
  hypo
  uterine vs. pancreas_gallbladder,breast, bladder_and_urothelial

SEQ ID NO: 483449 - DNA, 407 bp, Homo sapiens
  chr9:140400469-140400876
  hypo
  uterine vs. melanoma
agtgcaggaagaccctggcacggtcacatgccatccccagatcagaagtggcactgcctgggccccctacacacagaggggacactcaggacacggttcgctaggccactgacacaaacgtccgcggtgtgggctgagcacaccctgcagtctaaccacacagaccccggcagctccctcgagggagtcgggccctgagatccctccacaccctgctttctttcggcatctgcctcaatggctctgtgacccaccagctacaggttttctccgcagcttaaacccacacggtgccttcaacatttctgggcactgataaaggtagcccggtcggtacctaaaacacggaaggaaaccagccctggtcctgagccaaattcctcaaaccttgccatgcgtgccacacc

SEQ ID NO: 483450 - DNA, 235 bp, Homo sapiens
  chr9:140400905-140401140
  hypo
  uterine vs. melanoma
agagcaccctttctcttgctgtccatctcagggatgctgccgccctctgtatgtgagctcccctaacgggtgccctgggccgtcacgctggtgctttgggcttggctctttgcagtcccagccccatctcagaggttcgctcttcgcagtccagccccatcttggagggagggggttgaggcaccccctccaaagagctcccctgttgctgcttttgggcggcctcgggctgagc

SEQ ID NO: 483451 - DNA, 232 bp, Homo sapiens; identical to SEQ ID NO: 340489
  chr9:140645189-140645421
  hypo
  uterine vs. head_and_neck,lung,colorectal,upper_gi, cervical,pancreas_gallbladder,breast,liver_bileduct,anorectal, prostate,lymphoid_neoplasm

SEQ ID NO: 483452 - DNA, 129 bp, Homo sapiens; identical to SEQ ID NO: 467912
  chrX:2846679-2846808
  hypo
  uterine vs. upper_gi

SEQ ID NO: 483453 - DNA, 220 bp, Homo sapiens; identical to SEQ ID NO: 467913
  chrX:2846856-2847076
  hypo
  uterine vs. upper_gi

SEQ ID NO: 483454 - DNA, 314 bp, Homo sapiens; identical to SEQ ID NO: 362110
  chrX:2847196-2847510
  hypo
  uterine vs. upper_gi

SEQ ID NO: 483455 - DNA, 597 bp, Homo sapiens; identical to SEQ ID NO: 458369
  chrX:9432830-9433427
  hypo
  uterine vs. head_and_neck,upper_gi,prostate,lung

SEQ ID NO: 483456 - DNA, 135 bp, Homo sapiens; identical to SEQ ID NO: 458370
  chrX:9433471-9433606
  hypo
  uterine vs. head_and_neck,upper_gi,prostate,lung

SEQ ID NO: 483457 - DNA, 296 bp, Homo sapiens; identical to SEQ ID NO: 458371
  chrX:9433131-9433427
  hypo
  uterine vs. lung,upper_gi,head_and_neck,prostate

SEQ ID NO: 483458 - DNA, 242 bp, Homo sapiens; identical to SEQ ID NO: 458372
  chrX:9433471-9433713
  hypo
  uterine vs. lung,upper_gi,head_and_neck,prostate

SEQ ID NO: 483459 - DNA, 225 bp, Homo sapiens; identical to SEQ ID NO: 453522
  chrX:16730628-16730853
  hypo
  uterine vs. head_and_neck,prostate,upper_gi,lung,renal, ovary,bladder_and_urothelial,sarcoma

SEQ ID NO: 483460 - DNA, 35 bp, Homo sapiens; identical to SEQ ID NO: 345669
  chrX:16730902-16730937
  hypo
  uterine vs. head_and_neck,prostate,upper_gi,lung,renal, ovary,bladder_and_urothelial,sarcoma

SEQ ID NO: 483461 - DNA, 187 bp, Homo sapiens; identical to SEQ ID NO: 336699
  chrX:23801086-23801273
  hypo
  uterine vs. upper_gi,prostate,head_and_neck,lung

SEQ ID NO: 483462 - DNA, 223 bp, Homo sapiens; identical to SEQ ID NO: 336704
  chrX:39921413-39921636
  hypo
  uterine vs. head_and_neck,upper_gi

SEQ ID NO: 483463 - DNA, 301 bp, Homo sapiens; identical to SEQ ID NO: 336705
  chrX:39922006-39922307
  hypo
  uterine vs. upper_gi

SEQ ID NO: 483464 - DNA, 863 bp, Homo sapiens; identical to SEQ ID NO: 336706
  chrX:39931611-39932474
  hypo
  uterine vs. head_and_neck

SEQ ID NO: 483465 - DNA, 892 bp, Homo sapiens; identical to SEQ ID NO: 336707
  chrX:39933533-39934425
  hypo
  uterine vs. head_and_neck,upper_gi

SEQ ID NO: 483466 - DNA, 995 bp, Homo sapiens; identical to SEQ ID NO: 458399
  chrX:39955753-39956748
  hypo
  uterine vs. prostate,upper_gi,lung,head_and_neck, bladder_and_urothelial

SEQ ID NO: 483467 - DNA, 604 bp, Homo sapiens; identical to SEQ ID NO: 458400
  chrX:39956253-39956857
  hypo
  uterine vs. prostate,upper_gi,head_and_neck,lung, bladder_and_urothelial

SEQ ID NO: 483468 - DNA, 104 bp, Homo sapiens; identical to SEQ ID NO: 456211
  chrX:39956753-39956857
  hypo
  uterine vs. upper_gi,lung,head_and_neck,prostate

SEQ ID NO: 483469 - DNA, 90 bp, Homo sapiens; identical to SEQ ID NO: 456218
  chrX:40035057-40035147
  hypo
  uterine vs. prostate,head_and_neck,upper_gi, bladder_and_urothelial,lung,renal

SEQ ID NO: 483470 - DNA, 599 bp, Homo sapiens; identical to SEQ ID NO: 456219
  chrX:40035057-40035656
  hypo
  uterine vs. prostate,upper_gi,head_and_neck, bladder_and_urothelial,lung,renal

SEQ ID NO: 483471 - DNA, 564 bp, Homo sapiens; identical to SEQ ID NO: 456220
  chrX:40035161-40035725
  hypo
  uterine vs. upper_gi,prostate,head_and_neck,lung,renal, bladder_and_urothelial

SEQ ID NO: 483472 - DNA, 721 bp, Homo sapiens; identical to SEQ ID NO: 347751
  chrX:40035852-40036573
  hypo
  uterine vs. upper_gi,prostate,head_and_neck,lung,renal, bladder_and_urothelial

SEQ ID NO: 483473 - DNA, 85 bp, Homo sapiens; identical to SEQ ID NO: 458438
  chrX:123094093-123094178
  hypo
  uterine vs. lung,upper_gi,head_and_neck,prostate

SEQ ID NO: 483474 - DNA, 87 bp, Homo sapiens; identical to SEQ ID NO: 362175
  chrX:123094335-123094422
  hypo
  uterine vs. lung,upper_gi,head_and_neck,prostate

SEQ ID NO: 483475 - DNA, 198 bp, Homo sapiens; identical to SEQ ID NO: 336730
  chrX:123094505-123094703
  hypo
  uterine vs. lung,upper_gi,head_and_neck,liver_bileduct, bladder_and_urothelial,prostate

SEQ ID NO: 483476 - DNA, 856 bp, Homo sapiens; identical to SEQ ID NO: 336731
  chrX:129146935-129147791
  hypo
  uterine vs. upper_gi,bladder_and_urothelial, head_and_neck,prostate,lung

SEQ ID NO: 483477 - DNA, 116 bp, Homo sapiens; identical to SEQ ID NO: 336732
  chrX:129171389-129171505
  hypo
  uterine vs. upper_gi

SEQ ID NO: 483478 - DNA, 158 bp, Homo sapiens; identical to SEQ ID NO: 375448
  chrX:133507338-133507496
  hypo
  uterine vs. upper_gi
